(19) United States
(12) Patent Application Publication
(10) Pub. No.: US 2024/0252616 A1
(43) Pub. Date: Aug. 1, 2024

(54) LIVE-ATTENUATED VIRUS VACCINE

(71) Applicants: GRIFFITH UNIVERSITY, Nathan, Queensland4111 (AU); INDIAN IMMUNOLOGICALS LIMITED, Hyderabad, Andhra Pradesh (IN)

(72) Inventors: Surendran Mahalingam, Queensland (AU); Andres Merits, Tartu (EE); Xiang Liu, Queensland (AU)

(73) Assignees: GRIFFITH UNIVERSITY, Nathan, Queensland (AU); INDIAN IMMUNOLOGICALS LIMITED, Hyderabad, Andhra Pradesh (IN)

(21) Appl. No.: 18/016,137

(22) PCT Filed: Jul. 16, 2021
(86) PCT No.: PCT/AU2021/050763

§ 371 Date: Jan. 13, 2023

(30) Foreign Application Priority Data
Jul. 16, 2020 (IN) 202041030397
Dec. 23, 2020 (IN) 202041056151

(51) Int. Cl. A61K 39/215; A61K 39/00; A61P 37/04; C12N 7/00

(52) U.S. Cl. CPC A61K 39/215; A61P 37/04; C12N 7/00; A61K 2039/5254; A61K 2039/53; A61K 2039/543; C12N 2770/20034; C12N 2770/20062

(57) ABSTRACT

This invention relates to a codon deoptimized severe acute respiratory syndrome coronavirus 2 (SARS-COV-2) genome. In particular, embodiments of the invention concern a vaccine comprising live attenuated SARS-COV-2 comprising a partly codon deoptimized viral genome, SARS-COV-2 comprising a partly codon deoptimized viral genome, as well as their use in methods of treatment and prevention of viral infection. The ORF1a region of the viral genome has been codon deoptimized.

### RELATED APPLICATIONS

[0001] This application claims priority of Indian Provisional Patent Application No. 202041030397, filed 16 Jul. 2020, and Indian Provisional Patent Application No. 202041056151, filed 23 Dec. 2020, as well as the associated sequence listings filed on those same dates, the entire contents of which are incorporated herein by reference.

### TECHNICAL FIELD

[0002] This invention generally relates to a codon deoptimized severe acute respiratory syndrome coronavirus 2 (SARS-COV-2) genome. In particular, embodiments of the invention concern a vaccine comprising live attenuated SARS-COV-2 comprising a partly codon deoptimized viral genome, SARS-COV-2 comprising a partly codon deoptimized viral genome, as well as their use in methods of treatment and prevention of viral infection.

### BACKGROUND ART

[0003] Severe acute respiratory syndrome coronavirus 2 (SARS-COV-2) is a strain of beta-coronavirus that causes respiratory illness and is responsible for the COVID-19 pandemic. Multiple other vaccine formulations are currently under development around the world (e.g. RNA and DNA vaccine, subunit vaccine, inactivated whole virus vaccine, and recombinant virus vaccine). Codon deoptimization technology, applicable for construction of live attenuated vaccine candidates, at the time of filing has not been used to develop a commercially available live attenuated SARS-COV-2 vaccine.

[0004] Codon usage bias refers to the redundancy of the genetic code, where amino acids are determined by synonymous codons that occur in different organisms at different frequencies. The process of codon optimization, where each amino acid is encoded by the most abundant codon, is frequently exploited to improve gene expression in heterologous systems, a strategy that is used to increase immune responses to antigens. In contrast, codon deoptimization (CD), where all or a selected number of amino acid residues are encoded by a less or the least abundant codon(s), is used to decrease gene expression leading to reduced viral protein production and consequently reduced replication while the composition of viral antigens remains the same. The approach can also result in additional virus attenuation by removing/altering of RNA secondary structures of functional importance (Song Y, Gorbatsevych O, Liu Y, Mugavero J, Shen S H, Ward C B, Asare E, Jiang P, Paul A V, Mueller S. Wimmer E. Limits of variation, specific infectivity, and genome packaging of massively recoded poliovirus genomes. Proc Natl Acad Sci USA. 2017 Oct. 10; 114(41): E8731-E8740. doi: 10.1073/pnas.1714385114. Epub 2017 Sep. 25).

### SUMMARY OF THE INVENTION

[0005] Described herein, amongst other things, is a vaccine comprising live attenuated severe acute respiratory syndrome coronavirus 2 (SARS-COV-2) comprising a partly codon deoptimized viral genome, SARS-COV-2 comprising a partly codon deoptimized viral genome, as well as their use in methods of treatment and prevention of viral infection.

[0006] According to a first embodiment of the present invention, there is provided a live attenuated severe acute respiratory syndrome coronavirus 2 (SARS-COV-2), SARS-COV-2, SARS-COV-2 particle or SARS-COV-2 nucleic acid comprising a partly codon deoptimized SARS-COV-2 genome.

[0007] According to a second embodiment of the present invention, there is provided a recombinant, isolated or substantially purified nucleic acid comprising a partly codon deoptimized SARS-COV-2 genome or partly codon deoptimized region thereof.

[0008] According to a third embodiment of the present invention, there is provided a vector, plasmid or genetic construct comprising the nucleic acid of the second embodiment.

[0009] According to a fourth embodiment of the present invention, there is provided a cell or isolate containing the live attenuated SARS-COV-2, SARS-COV-2, SARS-COV-2 particle or SARS-COV-2 nucleic acid of the first embodiment, the nucleic acid of the second embodiment, or the vector, plasmid or genetic construct of the third embodiment.

[0010] According to a fifth embodiment of the present invention, there is provided a vaccine comprising the live attenuated SARS-COV-2, SARS-COV-2, SARS-COV-2 particle or SARS-COV-2 nucleic acid of the first embodiment, the recombinant, isolated or substantially purified nucleic acid of the second embodiment, the vector, plasmid or genetic construct of the third embodiment, or the cell or isolate of the fourth embodiment.

[0011] According to a sixth embodiment of the present invention, there is provided a pharmaceutical preparation comprising the live attenuated SARS-COV-2, SARS-COV-2, SARS-COV-2 particle or SARS-COV-2 nucleic acid of the first embodiment, the recombinant, isolated or substantially purified nucleic acid of the second embodiment, the vector, plasmid or genetic construct of the third embodiment, or the cell or isolate of the fourth embodiment.

[0012] According to a seventh embodiment of the present invention, there is provided an immunogenic composition comprising the live attenuated SARS-COV-2, SARS-COV-2, SARS-COV-2 particle or SARS-COV-2 nucleic acid of the first embodiment, the recombinant, isolated or substantially purified nucleic acid of the second embodiment, the vector, plasmid or genetic construct of the third embodiment, or the cell or isolate of the fourth embodiment.

[0013] According to an eighth embodiment of the present invention, there is provided a method of: (1) vaccinating a subject; (2) prophylactically immunizing a subject against SARS-CoV-2 or SARS-COV-2-like virus; (3) preventing a subject from contracting a SARS-COV-2 infection naturally or a SARS-COV-2-like infection naturally; (4) reducing the severity of a natural SARS-COV-2 disease or natural SARS-COV-2-like disease in a subject; or (5) treating a subject having a natural SARS-COV-2 infection or natural SARS-COV-2-like infection, said method comprising the step of administering to the subject: the live attenuated SARS-COV-2, SARS-COV-2, SARS-COV-2 particle or SARS-COV-2 nucleic acid of the first embodiment; the recombinant, isolated or substantially purified nucleic acid of the second embodiment; the vector, plasmid or genetic construct of the third embodiment; the cell or isolate of the fourth embodiment; the vaccine of the fifth embodiment; the pharmaceutical preparation of the sixth embodiment; or the immunogenic composition of the seventh embodiment.

[0014] According to a ninth embodiment of the present invention, there is provided the use of: the live attenuated SARS-COV-2, SARS-COV-2, SARS-COV-2 particle or SARS-COV-2 nucleic acid of the first embodiment; the recombinant, isolated or substantially purified nucleic acid of the second embodiment; the vector, plasmid or genetic construct of the third embodiment; the cell or isolate of the fourth embodiment; the vaccine of the fifth embodiment; the pharmaceutical preparation of the sixth embodiment; or the immunogenic composition of the seventh embodiment, in the preparation of a medicament for: (1) vaccinating a subject; (2) prophylactically immunizing a subject against SARS-COV-2 or SARS-COV-2-like virus; (3) preventing a subject from contracting a SARS-COV-2 infection naturally or a SARS-COV-2-like infection naturally; (4) reducing the severity of a natural SARS-COV-2 disease or natural SARS-COV-2-like disease in a subject; or (5) treating a subject having a natural SARS-COV-2 infection or natural SARS-COV-2-like infection.

[0015] According to a tenth embodiment of the present invention, there is provided: a live attenuated SARS-COV-2, SARS-COV-2, SARS-COV-2 particle or SARS-COV-2 nucleic acid of the first embodiment; a recombinant, isolated or substantially purified nucleic acid of the second embodiment; a vector, plasmid or genetic construct of the third embodiment; a cell or isolate of the fourth embodiment; a vaccine of the fifth embodiment; a pharmaceutical preparation of the sixth embodiment; or an immunogenic composition of the seventh embodiment, for use in: (1) vaccinating a subject; (2) prophylactically immunizing a subject against SARS-COV-2 or SARS-COV-2-like virus; (3) preventing a subject from contracting a SARS-COV-2 infection naturally or a SARS-COV-2-like infection naturally; (4) reducing the severity of a natural SARS-COV-2 disease or natural SARS-COV-2-like disease in a subject; or (5) treating a subject having a natural SARS-COV-2 infection or natural SARS-COV-2-like infection.

[0016] According to an eleventh embodiment of the present invention, there is provided a method of generating a live attenuated SARS-COV-2 vaccine, SARS-COV-2, SARS-COV-2 particle or SARS-COV-2 nucleic acid, or recombinant, isolated or substantially purified nucleic acid comprising a partly codon deoptimized SARS-COV-2 genome or partly codon deoptimized region thereof, comprising the step of partly codon deoptimizing a SARS-COV-2 genome.

[0017] According to a twelfth embodiment of the present invention, there is provided a method of preparing a vaccine comprising live attenuated SARS-COV-2, said method comprising the steps of: (1) codon deoptimizing a SARS-COV-2 genome to produce a partly codon deoptimized live attenuated SARS-COV-2; and (2) enabling the partly codon deoptimized live attenuated SARS-COV-2 to replicate.

[0018] According to a thirteenth embodiment of the present invention, there is provided a method of preparing a vaccine comprising codon deoptimized SARS-COV-2, said method comprising the steps of: optionally. (1) codon deoptimizing a SARS-COV-2 genome to produce a partly codon deoptimized live attenuated SARS-COV-2; (2) enabling the partly codon deoptimized live attenuated SARS-COV-2 to replicate; and (3) preparing a vaccine dose containing the replicated SARS-COV-2 of step (2).

[0019] According to a fourteenth embodiment of the present invention, there is provided a method of eliciting an immune response in a subject, said method comprising the step of administering a live attenuated SARS-COV-2, SARS-COV-2, SARS-COV-2 particle or SARS-CoV-2 nucleic acid of the first embodiment; the recombinant, isolated or substantially purified nucleic acid of the second embodiment; the vector, plasmid or genetic construct of the third embodiment; the cell or isolate of the fourth embodiment; the vaccine of the fifth embodiment; the pharmaceutical preparation of the sixth embodiment; or the immunogenic composition of the seventh embodiment to the subject to thereby elicit an immune response.

### BRIEF DESCRIPTION OF THE FIGURES

[0020] FIG. 1. Schematic representation of the SARS-COV-2 genome, showing the open reading frame ORF1a, and expressed polypeptides.

[0021] FIG. 2. Schematic representation of a bacterial artificial chromosome (BAC) genetic construct comprising the cDNA of SARS-COV-2 genome, for use in a transfection strategy for obtaining a first generation of infectious virus or vaccine candidates.

[0022] FIG. 3. Schematic representation showing how ORF1a fragments 2 and 3 can be cleaved using restriction enzymes to produce sub-fragments 2A, 2B, 2C, 3A and 3B, wherein these sub-fragments can be used in the generation of SARS-COV-2 vaccine candidates (first generation).

[0023] FIG. 4. Table characterising deoptimized sub-fragments 2A, 2B, 2C, 3A and 3B. All fragments are within the ORF1a region. Genomic positions within the Wuhan virus strain are shown in brackets. Regions presumed or known for cis-activities such as frame-shift signal at the junction of ORF1a and ORF1b were excluded.

[0024] FIG. 5. Schematic representation of an immunisation trial using SARS-COV-2 vaccine candidates in a non-human primate model.

[0025] FIG. 6. Schematic representation of an immunisation trial using SARS-COV-2 vaccine candidates in a mouse model.

[0026] FIG. 7. Flowchart shows steps from first generation SARS-COV-2 vaccine candidate construction, testing, to vaccine production.

[0027] FIG. 8. Codon deoptimized nucleotide sequence of sub-fragment 2A (SEQ ID NO:33). Codon deoptimized nucleotides have been underlined.

[0028] FIG. 9. Codon deoptimized nucleotide sequence of sub-fragment 2B (SEQ ID NO:34). Codon deoptimized nucleotides have been underlined.

[0029] FIG. 10. Codon deoptimized nucleotide sequence of sub-fragment 2C (SEQ ID NO:35). Codon deoptimized nucleotides have been underlined.

[0030] FIG. 11. Codon deoptimized nucleotide sequence of sub-fragment 3A (SEQ ID NO:36). Codon deoptimized nucleotides have been underlined.

[0031] FIG. 12. Codon deoptimized nucleotide sequence of sub-fragment 3B (SEQ ID NO:37). Codon deoptimized nucleotides have been underlined.

[0032] FIG. 13. Schematic representation of a bacterial artificial chromosome (BAC) construct comprising the cDNA of SARS-COV-2 genome, for use in a transfection strategy for obtaining a second generation of infectious virus or vaccine candidates.

[0033] FIG. 14. Schematic representation showing how the ORF1a can be cleaved using restriction enzymes to produce fragments 1, 2 and 3, wherein these fragments can be used in the generation of SARS-COV-2 vaccine candidates (second generation). Nucleotide positions within the Wuhan viral genome are indicated.

[0034] FIG. 15. Table characterising deoptimized fragments 1, 2 and 3. All fragments are within the ORF1a region. Nucleotide positions within the Wuhan viral genome are indicated. Regions presumed or known for cis-activities such as frame-shift signal at the junction of ORF1a and ORF1b were excluded.

[0035] FIG. 16. Flowchart showing steps from second generation SARS-COV-2 vaccine candidate construction, testing, to vaccine production.

[0036] FIG. 17. Growth curve of second generation clones/candidates SARS-COV-2 (circle symbol), SARS-COV-2-160-7 (square symbol), SARS-COV-2-4N-1 (triangle symbol) and SARS-COV-2-7N-1 (inverted triangle symbol) in Vero E6 cells at MOI 0.1 infection.

[0037] FIG. 18. Day 1 post infection CPE development in Vero E6 cells at MOI 0.1 infection A) Mock, B) SARS-COV-2, C) SARS-COV-2-160-7, D) SARS-COV-2-4N-1 and E) SARS-COV-2-7N-1.

[0038] FIG. 19. Day 2 post infection CPE development in Vero E6 cells at MOI 0.1 infection A) Mock, B) SARS-COV-2, C) SARS-COV-2-160-7, D) SARS-COV-2-4N-1 and E) SARS-COV-2-7N-1.

[0039] FIG. 20. Day 3 post infection CPE development in Vero E6 cells at MOI 0.1 infection A) Mock, B) SARS-COV-2, C) SARS-COV-2-160-7, D) SARS-COV-2-4N-1 and E) SARS-COV-2-7N-1.

[0040] FIG. 21. Plaque morphology in Vero E6 cells at MOI 0.1 infection A) SARS-CoV-2, B) SARS-COV-2-160-7, C) SARS-COV-2-4N-1 and D) SARS-COV-2-7N-1.

[0041] FIG. 22. Codon deoptimized nucleotide sequence between SanDI to PacI (SEQ ID NO:45) for clone SARS-COV-2-77. Codon deoptimized nucleotides are shown in red and boxed.

[0042] FIG. 23. Codon deoptimized nucleotide sequence between SanDI to PacI (SEQ ID NO:52) for clone SARS-COV-2-160. The sequence of SARS-COV-2 wildtype is shown above the clone. Codon deoptimized nucleotides are shown in red and boxed.

[0043] FIG. 24. Codon deoptimized nucleotide sequence between SanDI to PacI (SEQ ID NO:59) for clone SARS-COV-2-4N. The sequence of SARS-COV-2 wildtype is shown above the clone. Codon deoptimized nucleotides are shown in red and boxed.

[0044] FIG. 25. Codon deoptimized nucleotide sequence between SanDI to PacI (SEQ ID NO:66) for clone SARS-COV-2-7N. The sequence of SARS-COV-2 wildtype is shown above the clone. Codon deoptimized nucleotides are shown in red and boxed.

[0045] FIG. 26. Histopathological evaluation of hamster lungs, for cell and tissue damage and reactive inflammation, following infection with wild-type SARS-COV-2 or vaccine candidates 4N-1, 7N-1, 77-7, 160-4 and 160-7. The star symbol shows a bronchiole. The arrow shows tissue damage with reactive inflammatory cell infiltration. 26A—at day 3. 26B—at day 5. 26C—at day 7. 26D—at day 14.

[0046] FIG. 27. Histopathological evaluation of hamster lungs, for distribution of lesions, bronchial and peribronchial distribution of inflammatory cells, following infection with wild-type SARS-COV-2 or vaccine candidates 4N-1, 7N-1, 77-7, 160-4 and 160-7. The star symbol shows a bronchiole. The arrow shows bronchial and peribronchial distribution of inflammatory cells. 27A—at day 3. 27B—at day 5. 27C—at day 7. 27D—at day 14.

[0047] FIG. 28. Histopathological evaluation of hamster lungs, for circulatory and vascular lesions, including perivascular edema, desquamation of endothelial cells and endothelialitis, following infection with wild-type SARS-COV-2 or vaccine candidates 4N-1, 7N-1, 77-7, 160-4 and 160-7. The star symbol shows a bronchiole. The arrow shows perivascular edema and desquamation of endothelial cell with endothelialitis. 28A—at day 3. 28B—at day 5. 28C—at day 7. 28D—at day 14.

[0048] FIG. 29. Histopathological evaluation of hamster lungs, for regeneration and repair, following infection with wild-type SARS-COV-2 or vaccine candidates 4N-1, 7N-1, 77-7. 160-4 and 160-7. The star symbol shows a bronchiole. The arrow shows hyperplasia bronchial epithelial cells. 29A—at day 3. 29B—at day 5. 29C—at day 7. 29D—at day 14.

[0049] FIG. 30. Plotted results of a challenge experiment, showing the efficacy of vaccine candidate 7N-1. ‘7N-1 SC’ means subcutaneous administration. ‘7N-1 IN’ means intranasal administration. ‘WT nCOV’ means wild-type mouse-adapted SARS-COV. 7N-1 provided full protection from rechallenge mortality when given via an intranasal route in HFH4-hACE2 mice.

[0050] FIG. 31. Preclinical immunogenicity data in animal models. Hamsters were given a single dose of 10⁴ PFU of live attenuated virus (‘LAV’) candidate 160-7 or 7N-1 subcutaneously. The graphs show neutralizing antibody titres on day 14 after immunisation with LAV, wherein: PRNT₁₀₀ is the end point serum dilution where 100% neutralization was observed; PRNT₉₀ is the end point serum dilution where 90% neutralization was observed; and, PRNT₅₀ is the end point serum dilution where 50% neutralization was observed.

[0051] FIG. 32. Vaccine plaque size after multiple (2 and 4) in vitro passage. 32A—wildtype SARS-COV-2. 32B—vaccine candidate 160-7. 32C—vaccine candidates 77-7. 32D—vaccine candidate 160-4. 32E—vaccine candidate 4N-1. 32F—vaccine candidate 7N-1. Vaccine candidates 7N-1, 77-7, 4N-1, 160-4 and 160-7 were passaged up to 4 times in Vero GMP cells at multiplicity of infection of 0.01 PFU/cell. Each dot represents one plaque.

[0052] FIG. 33. Live attenuated COVID-19 vaccine showing attenuation in vitro. Multistep growth kinetics in Vero cells were obtained by infecting cells with WT SARS-COV-2 (Wildtype COVID-19) or LAV (vaccine candidate 7N-1) at an MOI of 0.01 PFU/cell.

[0053] FIG. 34. Survival plot. hACE-2 Tg mice were inoculated via the intranasal route with 10⁵ PFU wildtype SARS-COV-2 or LAV (candidate 7N-1).

[0054] FIG. 35. Survival plot. hACE-2 Tg mice were immunised via the intranasal route with 10³ PFU of vaccine 7N-1. Three weeks later, the mice were challenged with 10⁵ PFU wild-type SARS-COV-2 intranasally and monitored over a 12-day period.

[0055] FIG. 36. Histopathological evaluation of hamster lungs following infection with wild-type SARS-COV-2 or vaccine candidate 7N-1. Day 7: Distribution of lesions—bronchial and peribronchial distribution of inflammatory cells.

[0056] FIG. 37. Vaccine candidate 7N-1 provided full protection from rechallenge mortality when given via intranasal route in HFH4-hACE2 mice. A. Survival plot. Plotted results of a challenge experiment, showing the efficacy of vaccine candidate 7N-1. ‘7N-1 SC’ means subcutaneous administration. ‘7N-1 IN’ means intranasal administration. ‘WT nCOV’ means wild-type mouse-adapted SARS-COV. B. Graphed results for PBS, being unimmunized mice. C. Graphed results for WT nCOV (nCOV WT). D. Graphed results for mouse body weights post infection. E. Graphed results for 7N-1 SC. F. Graphed results for 7N-1 IN. Disease scores are as follows: 1=no disease; 2=mild fur ruffling; 3=moderate fur ruffling/disease signs; 4=moribund; 5=dead/euthanized.

### DESCRIPTION OF SEQUENCES

### First Generation of Clones.

[0057] For the description of clones below, ‘D’ denotes deoptimized and ‘W’ denotes wildtype and therefore not deoptimized.

[0058] SEQ ID NO:1. Clone pCCI-4K-SARS-COV-2-DDDDD. All five sub-fragments were deoptimized.

[0059] SEQ ID NO:2. Clone pCCI-4K-SARS-COV-2-DDDDW. The first four sub-fragments were deoptimized.

[0060] SEQ ID NO:3. Clone pCCI-4K-SARS-COV-2-DDDWD. Sub-fragments one, two, three, and five were deoptimized.

[0061] SEQ ID NO:4. Clone pCCI-4K-SARS-COV-2-DDDWW. The first three sub-fragments were deoptimized.

[0062] SEQ ID NO:5. Clone pCCI-4K-SARS-COV-2-DDWDD. Sub-fragments one, two, four, and five were deoptimized.

[0063] SEQ ID NO:6. Clone pCCI-4K-SARS-COV-2-DDWDW. Sub-fragments one, two, and four were deoptimized.

[0064] SEQ ID NO:7. Clone pCCI-4K-SARS-COV-2-DDWWD. Sub-fragments one, two, and five were deoptimized.

[0065] SEQ ID NO:8. Clone pCCI-4K-SARS-COV-2-DDWWW. The first two sub-fragments were deoptimized.

[0066] SEQ ID NO:9. Clone pCCI-4K-SARS-COV-2-DWDDD. First, third, fourth, and fifth sub-fragments were deoptimized.

[0067] SEQ ID NO:10. Clone pCCI-4K-SARS-COV-2-DWDDW. First, third, and fourth sub-fragments were deoptimized.

[0068] SEQ ID NO:11. Clone pCCI-4K-SARS-COV-2-DWDWD. First, third, and fifth sub-fragments were deoptimized.

[0069] SEQ ID NO:12. Clone pCCI-4K-SARS-COV-2-DWDWW. First and third sub-fragments were deoptimized.

[0070] SEQ ID NO:13. Clone pCCI-4K-SARS-COV-2-DWWDD. The first, fourth, and fifth sub-fragments were deoptimized.

[0071] SEQ ID NO:14. Clone pCCI-4K-SARS-COV-2-DWWDW. The first and fourth sub-fragments were deoptimized.

[0072] SEQ ID NO:15. Clone pCCI-4K-SARS-COV-2-DWWWD. The first and fifth sub-fragments were deoptimized.

[0073] SEQ ID NO:16. Clone pCCI-4K-SARS-COV-2-DWWWW. The first sub-fragment was deoptimized.

[0074] SEQ ID NO:17. Clone pCCI-4K-SARS-COV-2-WDDDW. The second, third, and fourth sub-fragments were deoptimized.

[0075] SEQ ID NO:18. Clone pCCI-4K-SARS-COV-2-WDDWD. The second, third, and fifth sub-fragments were deoptimized.

[0076] SEQ ID NO:19. Clone pCCI-4K-SARS-COV-2-WDDWW. The second and third sub-fragments were deoptimized.

[0077] SEQ ID NO:20. Clone pCCI-4K-SARS-COV-2-WDWDD. The second, fourth, and fifth sub-fragments were deoptimized.

[0078] SEQ ID NO:21. Clone pCCI-4K-SARS-COV-2-WDWDW. The second and fourth sub-fragments were deoptimized.

[0079] SEQ ID NO:22. Clone pCCI-4K-SARS-COV-2-WDWWD. The second and fifth sub-fragments were deoptimized.

[0080] SEQ ID NO:23. Clone pCCI-4K-SARS-COV-2-WDWWW. The second sub-fragment was deoptimized.

[0081] SEQ ID NO:24. Clone pCCI-4K-SARS-COV-2-WWDDD. The last three sub-fragments were deoptimized.

[0082] SEQ ID NO:25. Clone pCCI-4K-SARS-COV-2-WWDDW. The third and fourth sub-fragments were deoptimized.

[0083] SEQ ID NO:26. Clone pCCI-4K-SARS-COV-2-WWDWD. The third and fifth sub-fragments were deoptimized.

[0084] SEQ ID NO:27. Clone pCCI-4K-SARS-COV-2-WWDWW. The third sub-fragment was deoptimized.

[0085] SEQ ID NO:28. Clone pCCI-4K-SARS-COV-2-WWWDD. The last two sub-fragments were deoptimized.

[0086] SEQ ID NO:29. Clone pCCI-4K-SARS-COV-2-WWWDW. The fourth sub-fragment was deoptimized.

[0087] SEQ ID NO:30. Clone pCCI-4K-SARS-COV-2-WWWWD. The last sub-fragment was deoptimized.

[0088] SEQ ID NO:31. Clone pCCI-4K-SARS-COV-2-WDDDD. The last four sub-fragments were deoptimized.

[0089] SEQ ID NO:32. Clone pCCI-4K-SARS-COV-2. No sub-fragment was deoptimized (wild-type).

[0090] SEQ ID NO:33. Codon deoptimized nucleotide sequence of sub-fragment 2A.

[0091] SEQ ID NO:34. Codon deoptimized nucleotide sequence of sub-fragment 2B.

[0092] SEQ ID NO:35. Codon deoptimized nucleotide sequence of sub-fragment 2C.

[0093] SEQ ID NO:36. Codon deoptimized nucleotide sequence of sub-fragment 3A.

[0094] SEQ ID NO:37. Codon deoptimized nucleotide sequence of sub-fragment 3B.

[0095] SEQ ID NO:38. Wild-type nucleotide sequence encoding the E protein of the SARS-COV-2 genome.

### Second Generation of Clones.

SEQ ID NO: 39 - Clone pCC1-4K-SARS-CoV-2-77-1. Only fragment 3 has been
deoptimized:
GGGTCCCACGTGCTAGCGCTAACATAGGTTGTAACCATACAGGTGTTG
TTGGAGAAGGTTCCGAAGGTCTTAATGACAACCTTCTTGAAATACTCCAAAAAG
AGAAAGTCAACATCAATATTGTTGGTGACTTTAAACTTAATGAAGAGATCGCCAT
TATTTTGGCATCTTTTTCTGCTTCCACAAGTGCTTTTGTGGAAACTGTGAAAGGTT
TGGATTATAAAGCATTCAAACAAATTGTTGAATCCTGTGGTAATTTTAAAGTTAC
AAAAGGAAAAGCTAAAAAAGGTGCCTGGAATATTGGTGAACAGAAATCAATACT
GAGTCCTCTTTATGCATTTGCATCAGAGGCTGCTCGTGTTGTACGATCAATTTTCT
CCCGCACTCTTGAAACTGCTCAAAATTCTGTGCGTGTTTTACAGAAGGCCGCTAT
AACAATACTAGATGGAATTTCACAGTATTCACTGAGACTCATTGATGCTATGATG
TTCACATCTGATTTGGCTACTAACAATCTAGTTGTAATGGCCTACATTACAGGTG
GTGTTGTTCAGTTGACTTCGCAGTGGCTAACTAACATCTTTGGCACTGTTTATGAA
AAACTCAAACCCGTCCTTGATTGGCTTGAAGAGAAGTTTAAGGAAGGTGTAGAG
TTTCTTAGAGACGGTTGGGAAATTGTTAAATTTATCTCAACCTGTGCTTGTGAAAT
TGTCGGTGGACAAATTGTCACCTGTGCAAAGGAAATTAAGGAGAGTGTTCAGAC
ATTCTTTAAGCTTGTAAATAAATTTTTGGCTTTGTGTGCTGACTCTATCATTATTG
GTGGAGCTAAACTTAAAGCCTTGAATTTAGGTGAAACATTTGTCACGCACTCAAA
GGGATTGTACAGAAAGTGTGTTAAATCCAGAGAAGAAACTGGCCTACTCATGCC
TCTAAAAGCCCCAAAAGAAATTATCTTCTTAGAGGGAGAAACACTTCCCACAGA
AGTGTTAACAGAGGAAGTTGTCTTGAAAACTGGTGATTTACAACCATTAGAACA
ACCTACTAGTGAAGCTGTTGAAGCTCCATTGGTTGGTACACCAGTTTGTATTAAC
GGGCTTATGTTGCTCGAAATCAAAGACACAGAAAAGTACTGTGCCCTTGCACCTA
ATATGATGGTAACAAACAATACCTTCACACTCAAAGGCGGTGCACCAACAAAGG
TTACTTTTGGTGATGACACTGTGATAGAAGTGCAAGGTTACAAGAGTGTGAATAT
CACTTTTGAACTTGATGAAAGGATTGATAAAGTACTTAATGAGAAGTGCTCTGCC
TATACAGTTGAACTCGGTACAGAAGTAAATGAGTTCGCCTGTGTTGTGGCAGATG
CTGTCATAAAAACTTTGCAACCAGTATCTGAATTACTTACACCACTGGGCATTGA
TTTAGATGAGTGGAGTATGGCTACATACTACTTATTTGATGAGTCTGGTGAGTTT
AAATTGGCTTCACATATGTATTGTTCTTTCTACCCTCCAGATGAGGATGAAGAAG
AAGGTGATTGTGAAGAAGAAGAGTTTGAGCCATCAACTCAATATGAGTATGGTA
CTGAAGATGATTACCAAGGTAAACCTTTGGAATTTGGTGCCACTTCTGCTGCTCT
TCAACCTGAAGAAGAGCAAGAAGAAGATTGGTTAGATGATGATAGTCAACAAAC
TGTTGGTCAACAAGACGGCAGTGAGGACAATCAGACAACTACTATTCAAACAAT
TGTTGAGGTTCAACCTCAATTAGAGATGGAACTTACACCAGTTGTTCAGACTATT
GAAGTGAATAGTTTTAGTGGTTATTTAAAACTTACTGACAATGTATACATTAAAA
ATGCAGACATTGTGGAAGAAGCTAAAAAGGTAAAACCAACAGTGGTTGTTAATG
CAGCCAATGTTTACCTTAAACATGGAGGAGGTGTTGCAGGAGCCTTAAATAAGG
CTACTAACAATGCCATGCAAGTTGAATCTGATGATTACATAGCTACTAATGGACC
ACTTAAAGTGGGTGGTAGTTGTGTTTTAAGCGGACACAATCTTGCTAAACACTGT
CTTCATGTTGTCGGCCCAAATGTTAACAAAGGTGAAGACATTCAACTTCTTAAGA
GTGCTTATGAAAATTTTAATCAGCACGAAGTTCTACTTGCACCATTATTATCAGCT
GGTATTTTTGGTGCTGACCCTATACATTCTTTAAGAGTTTGTGTAGATACTGTTCG
CACAAATGTCTACTTAGCTGTCTTTGATAAAAATCTCTATGACAAACTTGTTTCAA
GCTTTTTGGAAATGAAGAGTGAAAAGCAAGTTGAACAAAAGATCGCTGAGATTC
CTAAAGAGGAAGTTAAGCCATTTATAACTGAAAGTAAACCTTCAGTTGAACAGA
GAAAACAAGATGATAAGAAAATCAAAGCTTGTGTTGAAGAAGTTACAACAACTC
TGGAAGAAACTAAGTTCCTCACAGAAAACTTGTTACTTTATATTGACATTAATGG
CAATCTTCATCCAGATTCTGCCACTCTTGTTAGTGACATTGACATCACTTTCTTAA
AGAAAGATGCTCCATATATAGTGGGTGATGTTGTTCAAGAGGGTGTTTTAACTGC
TGTGGTTATACCTACTAAAAAGGCTGGTGGCACTACTGAAATGCTAGCGAAAGC
TTTGAGAAAAGTGCCAACAGACAATTATATAACCACTTACCCGGGTCAGGGTTTA
AATGGTTACACTGTAGAGGAGGCAAAGACAGTGCTTAAAAAGTGTAAAAGTGCC
TTTTACATTCTACCATCTATTATCTCTAATGAGAAGCAAGAAATTCTTGGAACTGT
TTCTTGGAATTTGCGAGAAATGCTTGCACATGCAGAAGAAACACGCAAATTAAT
GCCTGTCTGTGTGGAAACTAAAGCCATAGTTTCAACTATACAGCGTAAATATAAG
GGTATTAAAATACAAGAGGGTGTGGTTGATTATGGTGCTAGATTTTACTTTTACA
CCAGTAAAACAACTGTAGCGTCACTTATCAACACACTTAACGATCTAAATGAAA
CTCTTGTTACAATGCCACTTGGCTATGTAACACATGGCTTAAATTTGGAAGAAGC
TGCTCGGTATATGAGATCTCTCAAAGTGCCAGCTACAGTTTCTGTTTCTTCACCTG
ATGCTGTTACAGCGTATAATGGTTATCTTACTTCTTCTTCTAAAACACCTGAAGAA
CATTTTATTGAAACCATCTCACTTGCTGGTTCCTATAAAGATTGGTCCTATTCTGG
ACAATCTACACAACTAGGTATAGAATTTCTTAAGAGAGGTGATAAAAGTGTATAT
TACACTAGTAATCCTACCACATTCCACCTAGATGGTGAAGTTATCACCTTTGACA
ATCTTAAGACACTTCTTTCTTTGAGAGAAGTGAGGACTATTAAGGTGTTTACAAC
AGTAGACAACATTAACCTCCACACGCAAGTTGTGGACATGTCAATGACATATGG
ACAACAGTTTGGTCCAACTTATTTGGATGGAGCTGATGTTACTAAAATAAAACCT
CATAATTCACATGAAGGTAAAACATTTTATGTTTTACCTAATGATGACACTCTAC
GTGTTGAGGCTTTTGAGTACTACCACACAACTGATCCTAGTTTTCTGGGTAGGTA
CATGTCAGCATTAAATCACACTAAAAAGTGGAAATACCCACAAGTTAATGGTTT
AACTTCTATTAAATGGGCAGATAACAACTGTTATCTTGCCACTGCATTGTTAACA
CTCCAACAAATAGAGTTGAAGTTTAATCCACCTGCTCTACAAGATGCTTATTACA
GAGCAAGGGCTGGTGAAGCTGCTAACTTTTGTGCACTTATCTTAGCCTACTGTAA
TAAGACAGTAGGTGAGTTAGGTGATGTTAGAGAAACAATGAGTTACTTGTTTCAA
CATGCCAATTTAGATTCTTGCAAAAGAGTCTTGAACGTGGTGTGTAAAACTTGTG
GACAACAGCAGACAACCCTTAAGGGTGTAGAAGCTGTTATGTACATGGGCACAC
TTTCTTATGAACAATTTAAGAAAGGTGTTCAGATACCTTGTACGTGTGGTAAACA
AGCTACAAAATATCTAGTACAACAGGAGTCACCTTTTGTTATGATGTCAGCACCA
CCTGCTCAGTATGAACTTAAGCATGGTACATTTACTTGTGCTAGTGAGTACACTG
GTAATTACCAGTGTGGTCACTATAAACATATAACTTCTAAAGAAACTTTGTATTG
CATAGACGGTGCTTTACTTACAAAGTCCTCAGAATACAAAGGTCCTATTACGGAT
GTTTTCTACAAAGAAAACAGTTACACAACAACCATAAAACCAGTTACTTATAAAT
TGGATGGTGTTGTTTGTACAGAAATTGACCCTAAGTTGGACAATTATTATAAGAA
AGACAATTCTTATTTCACAGAGCAACCAATTGATCTTGTACCAAACCAACCATAT
CCAAACGCAAGCTTCGATAATTTTAAGTTTGTATGTGATAATATCAAATTTGCTG
ATGATTTAAACCAGTTAACTGGTTATAAGAAACCTGCTTCAAGAGAGCTTAAAGT
TACATTTTTCCCTGACTTAAATGGTGATGTGGTGGCTATTGATTATAAACACTACA
CACCCTCTTTTAAGAAAGGAGCTAAATTGTTACATAAACCTATTGTTTGGCATGT
TAACAATGCAACTAATAAAGCCACGTATAAACCAAATACCTGGTGTATACGTTGT
CTTTGGAGCACAAAACCAGTTGAAACATCAAATTCGTTTGATGTACTGAAGTCAG
AGGACGCGCAGGGAATGGATAATCTTGCCTGCGAAGATCTAAAACCAGTCTCTG
AAGAAGTAGTGGAAAATCCTACCATACAGAAAGACGTTCTTGAGTGTAATGTGA
AAACTACCGAAGTTGTAGGAGACATTATACTTAAACCAGCAAATAATAGTTTAA
AAATTACAGAAGAGGTTGGCCACACAGATCTAATGGCTGCTTATGTAGACAATT
CTAGTCTTACTATTAAGAAACCTAATGAATTATCTAGAGTATTAGGTTTGAAAAC
CCTTGCTACTCATGGTTTAGCTGCTGTTAATAGTGTCCCTTGGGATACTATAGCTA
ATTATGCTAAGCCTTTTCTTAACAAAGTTGTTAGTACAACTACTAACATAGTTAC
ACGGTGTTTAAACCGTGTTTGTACTAATTATATGCCTTATTTCTTTACTTTATTGCT
ACAATTGTGTACTTTTACTAGAAGTACAAATTCTAGAATTAAAGCATCTATGCCG
ACTACTATAGCAAAGAATACTGTTAAGAGTGTCGGTAAATTTTGTCTAGAGGCTT
CATTTAATTATTTGAAGTCACCTAATTTTTCTAAACTGATAAATATTATAATTTGG
TTTTTACTATTAAGTGTTTGCCTAGGTTCGTTAATCTACTCAACCGCTGCTTTAGG
TGTTTTAATGTCGAATTTAGGCATGCCTTCTTACTGTACTGGTTACAGAGAAGGCT
ATTTGAACTCGACTAATGTCACTATTGCAACCTACTGTACTGGTTCTATACCTTGT
TCGGTTTGTCTTAGTGGTTTAGATTCTTTAGACACCTATCCTTCGTTAGAAACTAT
ACAAATTACCATTTCATCTTTTAAATGGGATTTAACTGCTTTTGGCTTAGTTGCAG
AGTGGTTTTTGGCATATATTCTTTTCACTAGGTTTTTCTATGTACTTGGATTGGCT
GCAATCATGCAATTGTTTTTCTCGTATTTTGCAGTACATTTTATTAGTAATTCGTG
GCTTATGTGGTTAATAATTAATCTTGTACAAATGGCCCCGATTTCAGCTATGGTTA
GAATGTACATCTTCTTTGCATCGTTTTATTATGTATGGAAAAGTTATGTGCATGTT
GTAGACGGTTGTAATTCGTCAACTTGTATGATGTGTTACAAACGTAATAGAGCAA
CAAGAGTCGAATGTACAACTATTGTTAATGGTGTTAGAAGGTCGTTTTATGTCTA
TGCTAATGGAGGTAAAGGCTTTTGCAAACTACACAATTGGAATTGTGTTAATTGT
GATACATTCTGTGCTGGTAGTACATTTATTTCGGATGAAGTTGCGAGAGACTTGT
CACTACAGTTTAAAAGACCAATAAATCCTACTGACCAGTCGTCTTACATCGTTGA
TAGTGTTACAGTGAAGAATGGTTCGATCCATCTTTACTTTGATAAAGCTGGTCAA
AAGACTTATGAAAGACATTCTCTCTCGCATTTTGTTAACTTAGACAACCTGAGAG
CTAATAACACTAAAGGTTCATTGCCTATTAATGTTATAGTTTTTGATGGTAAATCG
AAATGTGAAGAATCATCGGCAAAATCAGCGTCGGTTTACTACAGTCAGCTTATGT
GTCAACCTATACTGTTACTAGATCAGGCATTAGTGTCGGATGTTGGTGATAGTGC
GGAAGTTGCAGTTAAAATGTTTGATGCTTACGTTAATACGTTTTCGTCAACTTTTA
ACGTACCAATGGAAAAACTCAAAACACTAGTTGCAACTGCAGAAGCTGAACTTG
CAAAGAATGTGTCCTTAGACAATGTCTTATCGACTTTTATTTCAGCAGCTCGGCA
AGGGTTTGTTGATTCGGATGTAGAAACTAAAGATGTTGTTGAATGTCTTAAATTG
TCACATCAATCGGACATAGAAGTTACTGGCGATAGTTGTAATAACTATATGCTCA
CCTATAACAAAGTTGAAAACATGACACCCCGTGACCTTGGTGCTTGTATTGACTG
TTCGGCGCGTCATATTAATGCGCAGGTAGCAAAAAGTCACAACATTGCTTTGATA
TGGAACGTTAAAGATTTCATGTCGTTGTCTGAACAACTACGAAAACAAATACGTT
CGGCTGCTAAAAAGAATAACTTACCTTTTAAGTTGACATGTGCAACTACTAGACA
AGTTGTTAATGTTGTAACAACAAAGATAGCACTTAAGGGTGGTAAAATTGTTAAT
AATTGGTTGAAGCAGTTAATTAAA
SEQ ID NO: 40 - Clone pCC1-4K-SARS-COV-2-77-2. Only fragment 2 has been
deoptimized:
GGGTCCCACGTGCTAGCGCTAACATAGGTTGTAACCATACAGGTGTTG
TTGGAGAAGGTTCCGAAGGTCTTAATGACAACCTTCTTGAAATACTCCAAAAAG
AGAAAGTCAACATCAATATTGTTGGTGACTTTAAACTTAATGAAGAGATCGCCAT
TATTTTGGCATCTTTTTCTGCTTCCACAAGTGCTTTTGTGGAAACTGTGAAAGGTT
TGGATTATAAAGCATTCAAACAAATTGTTGAATCCTGTGGTAATTTTAAAGTTAC
AAAAGGAAAAGCTAAAAAAGGTGCCTGGAATATTGGTGAACAGAAATCAATACT
GAGTCCTCTTTATGCATTTGCATCAGAGGCTGCTCGTGTTGTACGATCAATTTTCT
CCCGCACTCTTGAAACTGCTCAAAATTCTGTGCGTGTTTTACAGAAGGCCGCTAT
AACAATACTAGATGGAATTTCACAGTATTCACTGAGACTCATTGATGCTATGATG
TTCACATCTGATTTGGCTACTAACAATCTAGTTGTAATGGCCTACATTACAGGTG
GTGTTGTTCAGTTGACTTCGCAGTGGCTAACTAACATCTTTGGCACTGTTTATGAA
AAACTCAAACCCGTCCTTGATTGGCTTGAAGAGAAGTTTAAGGAAGGTGTAGAG
TTTCTTAGAGACGGTTGGGAAATTGTTAAATTTATCTCAACCTGTGCTTGTGAAAT
TGTCGGTGGACAAATTGTCACCTGTGCAAAGGAAATTAAGGAGAGTGTTCAGAC
ATTCTTTAAGCTTGTAAATAAATTTTTGGCTTTGTGTGCTGACTCTATCATTATTG
GTGGAGCTAAACTTAAAGCCTTGAATTTAGGTGAAACATTTGTCACGCACTCAAA
GGGATTGTACAGAAAGTGTGTTAAATCCAGAGAAGAAACTGGCCTACTCATGCC
TCTAAAAGCCCCAAAAGAAATTATCTTCTTAGAGGGAGAAACACTTCCCACAGA
AGTGTTAACAGAGGAAGTTGTCTTGAAAACTGGTGATTTACAACCATTAGAACA
ACCTACTAGTGAAGCTGTTGAAGCTCCATTGGTTGGTACACCAGTTTGTATTAAC
GGGCTTATGTTGCTCGAAATCAAAGACACAGAAAAGTACTGTGCCCTTGCACCTA
ATATGATGGTAACAAACAATACCTTCACACTCAAAGGCGGTGCACCAACAAAGG
TTACTTTTGGTGATGACACTGTGATAGAAGTGCAAGGTTACAAGAGTGTGAATAT
CACTTTTGAACTTGATGAAAGGATTGATAAAGTACTTAATGAGAAGTGCTCTGCC
TATACAGTTGAACTCGGTACAGAAGTAAATGAGTTCGCCTGTGTTGTGGCAGATG
CTGTCATAAAAACTTTGCAACCAGTATCTGAATTACTTACACCACTGGGCATTGA
TTTAGATGAGTGGAGTATGGCTACATACTACTTATTTGATGAGTCTGGTGAGTTT
AAATTGGCTTCACATATGTATTGTTCTTTCTACCCTCCAGATGAGGATGAAGAAG
AAGGTGATTGTGAAGAAGAAGAGTTTGAGCCATCAACTCAATATGAGTATGGTA
CTGAAGATGATTACCAAGGTAAACCTTTGGAATTTGGTGCCACTTCTGCTGCTCT
TCAACCTGAAGAAGAGCAAGAAGAAGATTGGTTAGATGATGATAGTCAACAAAC
TGTTGGTCAACAAGACGGCAGTGAGGACAATCAGACAACTACTATTCAAACAAT
TGTTGAGGTTCAACCTCAATTAGAGATGGAACTTACACCAGTTGTTCAGACTATT
GAAGTGAATAGTTTTAGTGGTTATTTAAAACTTACTGACAATGTATACATTAAAA
ATGCAGACATTGTGGAAGAAGCTAAAAAGGTAAAACCAACAGTGGTTGTTAATG
CAGCCAATGTTTACCTTAAACATGGAGGAGGTGTTGCAGGAGCCTTAAATAAGG
CTACTAACAATGCCATGCAAGTTGAATCTGATGATTACATAGCTACTAATGGACC
ACTTAAAGTGGGTGGTAGTTGTGTTTTAAGCGGACACAATCTTGCTAAACACTGT
CTTCATGTTGTCGGCCCAAATGTTAACAAAGGTGAAGACATTCAACTTCTTAAGA
GTGCTTATGAAAATTTTAATCAGCACGAAGTTCTACTTGCACCATTATTATCAGCT
GGTATTTTTGGTGCTGACCCTATACATTCTTTAAGAGTTTGTGTAGATACTGTTCG
CACAAATGTCTACTTAGCTGTCTTTGATAAAAATCTCTATGACAAACTTGTTTCAA
GCTTTTTGGAAATGAAGAGTGAAAAGCAAGTTGAACAAAAGATCGCTGAGATTC
CTAAAGAGGAAGTTAAGCCATTTATAACTGAAAGTAAACCTTCAGTTGAACAGA
GAAAACAAGATGATAAGAAAATCAAAGCTTGTGTTGAAGAAGTTACAACAACTC
TGGAAGAAACTAAGTTCCTCACAGAAAACTTGTTACTTTATATTGACATTAATGG
CAATCTTCATCCAGATTCTGCCACTCTTGTTAGTGACATTGACATCACTTTCTTAA
AGAAAGATGCTCCATATATAGTGGGTGATGTTGTTCAAGAGGGTGTTTTAACTGC
TGTGGTTATACCTACTAAAAAGGCTGGTGGCACTACTGAAATGCTAGCGAAAGC
TTTGAGAAAAGTGCCAACAGACAATTATATAACCACTTACCCGGGTCAGGGTTTA
AATGGTTACACTGTAGAGGAGGCAAAGACAGTGCTTAAAAAGTGTAAATCGGCC
TTTTACATTCTACCATCTATTATCTCGAATGAGAAGCAAGAAATTCTTGGAACTG
TTTCTTGGAATTTGCGAGAAATGCTTGCACATGCAGAAGAAACACGCAAATTAAT
GCCTGTCTGTGTGGAAACTAAAGCCATAGTTTCGACTATACAGCGTAAATATAAG
GGTATTAAAATACAAGAGGGTGTGGTTGATTATGGTGCTAGATTTTACTTTTACA
CCAGTAAAACAACTGTAGCGTCGCTTATCAACACACTTAACGATCTAAATGAAA
CTCTTGTTACAATGCCACTTGGCTATGTAACACATGGCTTAAATTTGGAAGAAGC
TGCTCGGTATATGAGATCTCTCAAAGTGCCAGCTACAGTTTCGGTTTCTTCGCCTG
ATGCTGTTACAGCGTATAATGGTTATCTTACTTCTTCGTCTAAAACACCTGAAGA
ACATTTTATTGAAACCATCTCACTTGCTGGTTCGTATAAAGATTGGTCCTATTCGG
GACAATCTACACAACTAGGTATAGAATTTCTTAAGAGAGGTGATAAATCGGTAT
ATTACACTAGTAATCCTACCACATTCCACCTAGATGGTGAAGTTATCACCTTTGA
CAATCTTAAGACACTTCTTTCGTTGAGAGAAGTGAGGACTATTAAGGTGTTTACA
ACAGTAGACAACATTAACCTCCACACGCAAGTTGTGGACATGTCAATGACATAT
GGACAACAGTTTGGTCCAACTTATTTGGATGGAGCTGATGTTACTAAAATAAAAC
CTCATAATTCGCATGAAGGTAAAACATTTTATGTTTTACCTAATGATGACACTCT
ACGTGTTGAGGCTTTTGAGTACTACCACACAACTGATCCTAGTTTTCTGGGTAGG
TACATGTCGGCATTAAATCACACTAAAAAGTGGAAATACCCACAAGTTAATGGT
TTAACTTCTATTAAATGGGCAGATAACAACTGTTATCTTGCCACTGCATTGTTAAC
ACTCCAACAAATAGAGTTGAAGTTTAATCCACCTGCTCTACAAGATGCTTATTAC
AGAGCAAGGGCTGGTGAAGCTGCTAACTTTTGTGCACTTATCTTAGCCTACTGTA
ATAAGACAGTAGGTGAGTTAGGTGATGTTAGAGAAACAATGTCGTACTTGTTTCA
ACATGCCAATTTAGATTCTTGCAAAAGAGTCTTGAACGTGGTGTGTAAAACTTGT
GGACAACAGCAGACAACCCTTAAGGGTGTAGAAGCTGTTATGTACATGGGCACA
CTTTCGTATGAACAATTTAAGAAAGGTGTTCAGATACCTTGTACGTGTGGTAAAC
AAGCTACAAAATATCTAGTACAACAGGAGTCACCTTTTGTTATGATGTCGGCACC
ACCTGCTCAGTATGAACTTAAGCATGGTACATTTACTTGTGCTAGTGAGTACACT
GGTAATTACCAGTGTGGTCACTATAAACATATAACTTCGAAAGAAACTTTGTATT
GCATAGACGGTGCTTTACTTACAAAGTCCTCGGAATACAAAGGTCCTATTACGGA
TGTTTTCTACAAAGAAAACAGTTACACAACAACCATAAAACCAGTTACTTATAAA
TTGGATGGTGTTGTTTGTACAGAAATTGACCCTAAGTTGGACAATTATTATAAGA
AAGACAATTCGTATTTCACAGAGCAACCAATTGATCTTGTACCAAACCAACCATA
TCCAAACGCAAGCTTCGATAATTTTAAGTTTGTATGTGATAATATCAAATTTGCT
GATGATTTAAACCAGTTAACTGGTTATAAGAAACCTGCTTCGAGAGAGCTTAAAG
TTACATTTTTCCCTGACTTAAATGGTGATGTGGTGGCTATTGATTATAAACACTAC
ACACCCTCTTTTAAGAAAGGAGCTAAATTGTTACATAAACCTATTGTTTGGCATG
TTAACAATGCAACTAATAAAGCCACGTATAAACCAAATACCTGGTGTATACGTTG
TCTTTGGTCGACAAAACCAGTTGAAACATCAAATTCGTTTGATGTACTGAAGTCA
GAGGACGCGCAGGGAATGGATAATCTTGCCTGCGAAGATCTAAAACCAGTCTCG
GAAGAAGTAGTGGAAAATCCTACCATACAGAAAGACGTTCTTGAGTGTAATGTG
AAAACTACCGAAGTTGTAGGAGACATTATACTTAAACCAGCAAATAATAGTTTA
AAAATTACAGAAGAGGTTGGCCACACAGATCTAATGGCTGCTTATGTAGACAAT
TCGAGTCTTACTATTAAGAAACCTAATGAATTATCTAGAGTATTAGGTTTGAAAA
CCCTTGCTACTCATGGTTTAGCTGCTGTTAATTCGGTCCCTTGGGATACTATAGCT
AATTATGCTAAGCCTTTTCTTAACAAAGTTGTTAGTACAACTACTAACATAGTTA
CACGGTGTTTAAACCGTGTTTGTACTAATTATATGCCTTATTTCTTTACTTTATTGC
TACAATTGTGTACTTTTACTAGATCGACAAATTCTAGAATTAAAGCATCGATGCC
GACTACTATAGCAAAGAATACTGTTAAGAGTGTCGGTAAATTTTGTCTAGAGGCT
TCGTTTAATTATTTGAAGTCACCTAATTTTTCGAAACTGATAAATATTATAATTTG
GTTTTTACTATTAAGTGTTTGCCTAGGTTCTTTAATCTACTCAACCGCTGCTTTAG
GTGTTTTAATGTCTAATTTAGGCATGCCTTCTTACTGTACTGGTTACAGAGAAGGC
TATTTGAACTCTACTAATGTCACTATTGCAACCTACTGTACTGGTTCTATACCTTG
TAGTGTTTGTCTTAGTGGTTTAGATTCTTTAGACACCTATCCTTCTTTAGAAACTA
TACAAATTACCATTTCATCTTTTAAATGGGATTTAACTGCTTTTGGCTTAGTTGCA
GAGTGGTTTTTGGCATATATTCTTTTCACTAGGTTTTTCTATGTACTTGGATTGGC
TGCAATCATGCAATTGTTTTTCAGCTATTTTGCAGTACATTTTATTAGTAATTCTT
GGCTTATGTGGTTAATAATTAATCTTGTACAAATGGCCCCGATTTCAGCTATGGTT
AGAATGTACATCTTCTTTGCATCATTTTATTATGTATGGAAAAGTTATGTGCATGT
TGTAGACGGTTGTAATTCATCAACTTGTATGATGTGTTACAAACGTAATAGAGCA
ACAAGAGTCGAATGTACAACTATTGTTAATGGTGTTAGAAGGTCCTTTTATGTCT
ATGCTAATGGAGGTAAAGGCTTTTGCAAACTACACAATTGGAATTGTGTTAATTG
TGATACATTCTGTGCTGGTAGTACATTTATTAGTGATGAAGTTGCGAGAGACTTG
TCACTACAGTTTAAAAGACCAATAAATCCTACTGACCAGTCTTCTTACATCGTTG
ATAGTGTTACAGTGAAGAATGGTTCCATCCATCTTTACTTTGATAAAGCTGGTCA
AAAGACTTATGAAAGACATTCTCTCTCTCATTTTGTTAACTTAGACAACCTGAGA
GCTAATAACACTAAAGGTTCATTGCCTATTAATGTTATAGTTTTTGATGGTAAATC
AAAATGTGAAGAATCATCTGCAAAATCAGCGTCTGTTTACTACAGTCAGCTTATG
TGTCAACCTATACTGTTACTAGATCAGGCATTAGTGTCTGATGTTGGTGATAGTG
CGGAAGTTGCAGTTAAAATGTTTGATGCTTACGTTAATACGTTTTCATCAACTTTT
AACGTACCAATGGAAAAACTCAAAACACTAGTTGCAACTGCAGAAGCTGAACTT
GCAAAGAATGTGTCCTTAGACAATGTCTTATCTACTTTTATTTCAGCAGCTCGGC
AAGGGTTTGTTGATTCAGATGTAGAAACTAAAGATGTTGTTGAATGTCTTAAATT
GTCACATCAATCTGACATAGAAGTTACTGGCGATAGTTGTAATAACTATATGCTC
ACCTATAACAAAGTTGAAAACATGACACCCCGTGACCTTGGTGCTTGTATTGACT
GTAGTGCGCGTCATATTAATGCGCAGGTAGCAAAAAGTCACAACATTGCTTTGAT
ATGGAACGTTAAAGATTTCATGTCATTGTCTGAACAACTACGAAAACAAATACGT
AGTGCTGCTAAAAAGAATAACTTACCTTTTAAGTTGACATGTGCAACTACTAGAC
AAGTTGTTAATGTTGTAACAACAAAGATAGCACTTAAGGGTGGTAAAATTGTTAA
TAATTGGTTGAAGCAGTTAATTAAA
SEQ ID NO: 41 - Clone pCC1-4K-SARS-COV-2-77-3. Only fragment 1 has been
deoptimized:
GGGTCCCACGTGCTAGCGCTAACATAGGTTGTAACCATACAGGTGTTG
TTGGAGAAGGTTCGGAAGGTCTTAATGACAACCTTCTTGAAATACTCCAAAAAG
AGAAAGTCAACATCAATATTGTTGGTGACTTTAAACTTAATGAAGAGATCGCCAT
TATTTTGGCATCTTTTTCGGCTTCCACATCGGCTTTTGTGGAAACTGTGAAAGGTT
TGGATTATAAAGCATTCAAACAAATTGTTGAATCCTGTGGTAATTTTAAAGTTAC
AAAAGGAAAAGCTAAAAAAGGTGCCTGGAATATTGGTGAACAGAAATCGATACT
GAGTCCTCTTTATGCATTTGCATCGGAGGCTGCTCGTGTTGTACGATCAATTTTCT
CGCGCACTCTTGAAACTGCTCAAAATTCTGTGCGTGTTTTACAGAAGGCCGCTAT
AACAATACTAGATGGAATTTCGCAGTATTCACTGAGACTCATTGATGCTATGATG
TTCACATCGGATTTGGCTACTAACAATCTAGTTGTAATGGCCTACATTACAGGTG
GTGTTGTTCAGTTGACTTCGCAGTGGCTAACTAACATCTTTGGCACTGTTTATGAA
AAACTCAAACCCGTCCTTGATTGGCTTGAAGAGAAGTTTAAGGAAGGTGTAGAG
TTTCTTAGAGACGGTTGGGAAATTGTTAAATTTATCTCAACCTGTGCTTGTGAAAT
TGTCGGTGGACAAATTGTCACCTGTGCAAAGGAAATTAAGGAGTCGGTTCAGAC
ATTCTTTAAGCTTGTAAATAAATTTTTGGCTTTGTGTGCTGACTCTATCATTATTG
GTGGAGCTAAACTTAAAGCCTTGAATTTAGGTGAAACATTTGTCACGCACTCGAA
GGGATTGTACAGAAAGTGTGTTAAATCCAGAGAAGAAACTGGCCTACTCATGCC
TCTAAAAGCCCCAAAAGAAATTATCTTCTTAGAGGGAGAAACACTTCCCACAGA
AGTGTTAACAGAGGAAGTTGTCTTGAAAACTGGTGATTTACAACCATTAGAACA
ACCTACTTCGGAAGCTGTTGAAGCTCCATTGGTTGGTACACCAGTTTGTATTAAC
GGGCTTATGTTGCTCGAAATCAAAGACACAGAAAAGTACTGTGCCCTTGCACCTA
ATATGATGGTAACAAACAATACCTTCACACTCAAAGGCGGTGCACCAACAAAGG
TTACTTTTGGTGATGACACTGTGATAGAAGTGCAAGGTTACAAGAGTGTGAATAT
CACTTTTGAACTTGATGAAAGGATTGATAAAGTACTTAATGAGAAGTGCTCGGCC
TATACAGTTGAACTCGGTACAGAAGTAAATGAGTTCGCCTGTGTTGTGGCAGATG
CTGTCATAAAAACTTTGCAACCAGTATCTGAATTACTTACACCACTGGGCATTGA
TTTAGATGAGTGGTCGATGGCTACATACTACTTATTTGATGAGTCTGGTGAGTTT
AAATTGGCTTCGCATATGTATTGTTCTTTCTACCCTCCAGATGAGGATGAAGAAG
AAGGTGATTGTGAAGAAGAAGAGTTTGAGCCATCGACTCAATATGAGTATGGTA
CTGAAGATGATTACCAAGGTAAACCTTTGGAATTTGGTGCCACTTCTGCTGCTCT
TCAACCTGAAGAAGAGCAAGAAGAAGATTGGTTAGATGATGATTCGCAACAAAC
TGTTGGTCAACAAGACGGCAGTGAGGACAATCAGACAACTACTATTCAAACAAT
TGTTGAGGTTCAACCTCAATTAGAGATGGAACTTACACCAGTTGTTCAGACTATT
GAAGTGAATTCGTTTAGTGGTTATTTAAAACTTACTGACAATGTATACATTAAAA
ATGCAGACATTGTGGAAGAAGCTAAAAAGGTAAAACCAACAGTGGTTGTTAATG
CAGCCAATGTTTACCTTAAACATGGAGGAGGTGTTGCAGGAGCCTTAAATAAGG
CTACTAACAATGCCATGCAAGTTGAATCGGATGATTACATAGCTACTAATGGACC
ACTTAAAGTGGGTGGTTCGTGTGTTTTAAGCGGACACAATCTTGCTAAACACTGT
CTTCATGTTGTCGGCCCAAATGTTAACAAAGGTGAAGACATTCAACTTCTTAAGT
CGGCTTATGAAAATTTTAATCAGCACGAAGTTCTACTTGCACCATTATTATCAGC
TGGTATTTTTGGTGCTGACCCTATACATTCGTTAAGAGTTTGTGTAGATACTGTTC
GCACAAATGTCTACTTAGCTGTCTTTGATAAAAATCTCTATGACAAACTTGTTTCA
TCGTTTTTGGAAATGAAGAGTGAAAAGCAAGTTGAACAAAAGATCGCTGAGATT
CCTAAAGAGGAAGTTAAGCCATTTATAACTGAATCGAAACCTTCAGTTGAACAG
AGAAAACAAGATGATAAGAAAATCAAAGCTTGTGTTGAAGAAGTTACAACAACT
CTGGAAGAAACTAAGTTCCTCACAGAAAACTTGTTACTTTATATTGACATTAATG
GCAATCTTCATCCAGATTCGGCCACTCTTGTTAGTGACATTGACATCACTTTCTTA
AAGAAAGATGCTCCATATATAGTGGGTGATGTTGTTCAAGAGGGTGTTTTAACTG
CTGTGGTTATACCTACTAAAAAGGCTGGTGGCACTACTGAAATGCTAGCGAAAG
CTTTGAGAAAAGTGCCAACAGACAATTATATAACCACTTACCCGGGTCAGGGTTT
AAATGGTTACACTGTAGAGGAGGCAAAGACAGTGCTTAAAAAGTGTAAAAGTGC
CTTTTACATTCTACCATCTATTATCTCTAATGAGAAGCAAGAAATTCTTGGAACTG
TTTCTTGGAATTTGCGAGAAATGCTTGCACATGCAGAAGAAACACGCAAATTAAT
GCCTGTCTGTGTGGAAACTAAAGCCATAGTTTCAACTATACAGCGTAAATATAAG
GGTATTAAAATACAAGAGGGTGTGGTTGATTATGGTGCTAGATTTTACTTTTACA
CCAGTAAAACAACTGTAGCGTCACTTATCAACACACTTAACGATCTAAATGAAA
CTCTTGTTACAATGCCACTTGGCTATGTAACACATGGCTTAAATTTGGAAGAAGC
TGCTCGGTATATGAGATCTCTCAAAGTGCCAGCTACAGTTTCTGTTTCTTCACCTG
ATGCTGTTACAGCGTATAATGGTTATCTTACTTCTTCTTCTAAAACACCTGAAGAA
CATTTTATTGAAACCATCTCACTTGCTGGTTCCTATAAAGATTGGTCCTATTCTGG
ACAATCTACACAACTAGGTATAGAATTTCTTAAGAGAGGTGATAAAAGTGTATAT
TACACTAGTAATCCTACCACATTCCACCTAGATGGTGAAGTTATCACCTTTGACA
ATCTTAAGACACTTCTTTCTTTGAGAGAAGTGAGGACTATTAAGGTGTTTACAAC
AGTAGACAACATTAACCTCCACACGCAAGTTGTGGACATGTCAATGACATATGG
ACAACAGTTTGGTCCAACTTATTTGGATGGAGCTGATGTTACTAAAATAAAACCT
CATAATTCACATGAAGGTAAAACATTTTATGTTTTACCTAATGATGACACTCTAC
GTGTTGAGGCTTTTGAGTACTACCACACAACTGATCCTAGTTTTCTGGGTAGGTA
CATGTCAGCATTAAATCACACTAAAAAGTGGAAATACCCACAAGTTAATGGTTT
AACTTCTATTAAATGGGCAGATAACAACTGTTATCTTGCCACTGCATTGTTAACA
CTCCAACAAATAGAGTTGAAGTTTAATCCACCTGCTCTACAAGATGCTTATTACA
GAGCAAGGGCTGGTGAAGCTGCTAACTTTTGTGCACTTATCTTAGCCTACTGTAA
TAAGACAGTAGGTGAGTTAGGTGATGTTAGAGAAACAATGAGTTACTTGTTTCAA
CATGCCAATTTAGATTCTTGCAAAAGAGTCTTGAACGTGGTGTGTAAAACTTGTG
GACAACAGCAGACAACCCTTAAGGGTGTAGAAGCTGTTATGTACATGGGCACAC
TTTCTTATGAACAATTTAAGAAAGGTGTTCAGATACCTTGTACGTGTGGTAAACA
AGCTACAAAATATCTAGTACAACAGGAGTCACCTTTTGTTATGATGTCAGCACCA
CCTGCTCAGTATGAACTTAAGCATGGTACATTTACTTGTGCTAGTGAGTACACTG
GTAATTACCAGTGTGGTCACTATAAACATATAACTTCTAAAGAAACTTTGTATTG
CATAGACGGTGCTTTACTTACAAAGTCCTCAGAATACAAAGGTCCTATTACGGAT
GTTTTCTACAAAGAAAACAGTTACACAACAACCATAAAACCAGTTACTTATAAAT
TGGATGGTGTTGTTTGTACAGAAATTGACCCTAAGTTGGACAATTATTATAAGAA
AGACAATTCTTATTTCACAGAGCAACCAATTGATCTTGTACCAAACCAACCATAT
CCAAACGCAAGCTTCGATAATTTTAAGTTTGTATGTGATAATATCAAATTTGCTG
ATGATTTAAACCAGTTAACTGGTTATAAGAAACCTGCTTCAAGAGAGCTTAAAGT
TACATTTTTCCCTGACTTAAATGGTGATGTGGTGGCTATTGATTATAAACACTACA
CACCCTCTTTTAAGAAAGGAGCTAAATTGTTACATAAACCTATTGTTTGGCATGT
TAACAATGCAACTAATAAAGCCACGTATAAACCAAATACCTGGTGTATACGTTGT
CTTTGGAGCACAAAACCAGTTGAAACATCAAATTCGTTTGATGTACTGAAGTCAG
AGGACGCGCAGGGAATGGATAATCTTGCCTGCGAAGATCTAAAACCAGTCTCTG
AAGAAGTAGTGGAAAATCCTACCATACAGAAAGACGTTCTTGAGTGTAATGTGA
AAACTACCGAAGTTGTAGGAGACATTATACTTAAACCAGCAAATAATAGTTTAA
AAATTACAGAAGAGGTTGGCCACACAGATCTAATGGCTGCTTATGTAGACAATT
CTAGTCTTACTATTAAGAAACCTAATGAATTATCTAGAGTATTAGGTTTGAAAAC
CCTTGCTACTCATGGTTTAGCTGCTGTTAATAGTGTCCCTTGGGATACTATAGCTA
ATTATGCTAAGCCTTTTCTTAACAAAGTTGTTAGTACAACTACTAACATAGTTAC
ACGGTGTTTAAACCGTGTTTGTACTAATTATATGCCTTATTTCTTTACTTTATTGCT
ACAATTGTGTACTTTTACTAGAAGTACAAATTCTAGAATTAAAGCATCTATGCCG
ACTACTATAGCAAAGAATACTGTTAAGAGTGTCGGTAAATTTTGTCTAGAGGCTT
CATTTAATTATTTGAAGTCACCTAATTTTTCTAAACTGATAAATATTATAATTTGG
TTTTTACTATTAAGTGTTTGCCTAGGTTCTTTAATCTACTCAACCGCTGCTTTAGG
TGTTTTAATGTCTAATTTAGGCATGCCTTCTTACTGTACTGGTTACAGAGAAGGCT
ATTTGAACTCTACTAATGTCACTATTGCAACCTACTGTACTGGTTCTATACCTTGT
AGTGTTTGTCTTAGTGGTTTAGATTCTTTAGACACCTATCCTTCTTTAGAAACTAT
ACAAATTACCATTTCATCTTTTAAATGGGATTTAACTGCTTTTGGCTTAGTTGCAG
AGTGGTTTTTGGCATATATTCTTTTCACTAGGTTTTTCTATGTACTTGGATTGGCT
GCAATCATGCAATTGTTTTTCAGCTATTTTGCAGTACATTTTATTAGTAATTCTTG
GCTTATGTGGTTAATAATTAATCTTGTACAAATGGCCCCGATTTCAGCTATGGTTA
GAATGTACATCTTCTTTGCATCATTTTATTATGTATGGAAAAGTTATGTGCATGTT
GTAGACGGTTGTAATTCATCAACTTGTATGATGTGTTACAAACGTAATAGAGCAA
CAAGAGTCGAATGTACAACTATTGTTAATGGTGTTAGAAGGTCCTTTTATGTCTA
TGCTAATGGAGGTAAAGGCTTTTGCAAACTACACAATTGGAATTGTGTTAATTGT
GATACATTCTGTGCTGGTAGTACATTTATTAGTGATGAAGTTGCGAGAGACTTGT
CACTACAGTTTAAAAGACCAATAAATCCTACTGACCAGTCTTCTTACATCGTTGA
TAGTGTTACAGTGAAGAATGGTTCCATCCATCTTTACTTTGATAAAGCTGGTCAA
AAGACTTATGAAAGACATTCTCTCTCTCATTTTGTTAACTTAGACAACCTGAGAG
CTAATAACACTAAAGGTTCATTGCCTATTAATGTTATAGTTTTTGATGGTAAATCA
AAATGTGAAGAATCATCTGCAAAATCAGCGTCTGTTTACTACAGTCAGCTTATGT
GTCAACCTATACTGTTACTAGATCAGGCATTAGTGTCTGATGTTGGTGATAGTGC
GGAAGTTGCAGTTAAAATGTTTGATGCTTACGTTAATACGTTTTCATCAACTTTTA
ACGTACCAATGGAAAAACTCAAAACACTAGTTGCAACTGCAGAAGCTGAACTTG
CAAAGAATGTGTCCTTAGACAATGTCTTATCTACTTTTATTTCAGCAGCTCGGCA
AGGGTTTGTTGATTCAGATGTAGAAACTAAAGATGTTGTTGAATGTCTTAAATTG
TCACATCAATCTGACATAGAAGTTACTGGCGATAGTTGTAATAACTATATGCTCA
CCTATAACAAAGTTGAAAACATGACACCCCGTGACCTTGGTGCTTGTATTGACTG
TAGTGCGCGTCATATTAATGCGCAGGTAGCAAAAAGTCACAACATTGCTTTGATA
TGGAACGTTAAAGATTTCATGTCATTGTCTGAACAACTACGAAAACAAATACGTA
GTGCTGCTAAAAAGAATAACTTACCTTTTAAGTTGACATGTGCAACTACTAGACA
AGTTGTTAATGTTGTAACAACAAAGATAGCACTTAAGGGTGGTAAAATTGTTAAT
AATTGGTTGAAGCAGTTAATTAAA
SEQ ID NO: 42 - Clone pCC1-4K-SARS-COV-2-77-4. Only fragments 1 and 2
have been deoptimized:
GGGTCCCACGTGCTAGCGCTAACATAGGTTGTAACCATACAGGTGTTG
TTGGAGAAGGTTCGGAAGGTCTTAATGACAACCTTCTTGAAATACTCCAAAAAG
AGAAAGTCAACATCAATATTGTTGGTGACTTTAAACTTAATGAAGAGATCGCCAT
TATTTTGGCATCTTTTTCGGCTTCCACATCGGCTTTTGTGGAAACTGTGAAAGGTT
TGGATTATAAAGCATTCAAACAAATTGTTGAATCCTGTGGTAATTTTAAAGTTAC
AAAAGGAAAAGCTAAAAAAGGTGCCTGGAATATTGGTGAACAGAAATCGATACT
GAGTCCTCTTTATGCATTTGCATCGGAGGCTGCTCGTGTTGTACGATCAATTTTCT
CGCGCACTCTTGAAACTGCTCAAAATTCTGTGCGTGTTTTACAGAAGGCCGCTAT
AACAATACTAGATGGAATTTCGCAGTATTCACTGAGACTCATTGATGCTATGATG
TTCACATCGGATTTGGCTACTAACAATCTAGTTGTAATGGCCTACATTACAGGTG
GTGTTGTTCAGTTGACTTCGCAGTGGCTAACTAACATCTTTGGCACTGTTTATGAA
AAACTCAAACCCGTCCTTGATTGGCTTGAAGAGAAGTTTAAGGAAGGTGTAGAG
TTTCTTAGAGACGGTTGGGAAATTGTTAAATTTATCTCAACCTGTGCTTGTGAAAT
TGTCGGTGGACAAATTGTCACCTGTGCAAAGGAAATTAAGGAGTCGGTTCAGAC
ATTCTTTAAGCTTGTAAATAAATTTTTGGCTTTGTGTGCTGACTCTATCATTATTG
GTGGAGCTAAACTTAAAGCCTTGAATTTAGGTGAAACATTTGTCACGCACTCGAA
GGGATTGTACAGAAAGTGTGTTAAATCCAGAGAAGAAACTGGCCTACTCATGCC
TCTAAAAGCCCCAAAAGAAATTATCTTCTTAGAGGGAGAAACACTTCCCACAGA
AGTGTTAACAGAGGAAGTTGTCTTGAAAACTGGTGATTTACAACCATTAGAACA
ACCTACTTCGGAAGCTGTTGAAGCTCCATTGGTTGGTACACCAGTTTGTATTAAC
GGGCTTATGTTGCTCGAAATCAAAGACACAGAAAAGTACTGTGCCCTTGCACCTA
ATATGATGGTAACAAACAATACCTTCACACTCAAAGGCGGTGCACCAACAAAGG
TTACTTTTGGTGATGACACTGTGATAGAAGTGCAAGGTTACAAGAGTGTGAATAT
CACTTTTGAACTTGATGAAAGGATTGATAAAGTACTTAATGAGAAGTGCTCGGCC
TATACAGTTGAACTCGGTACAGAAGTAAATGAGTTCGCCTGTGTTGTGGCAGATG
CTGTCATAAAAACTTTGCAACCAGTATCTGAATTACTTACACCACTGGGCATTGA
TTTAGATGAGTGGTCGATGGCTACATACTACTTATTTGATGAGTCTGGTGAGTTT
AAATTGGCTTCGCATATGTATTGTTCTTTCTACCCTCCAGATGAGGATGAAGAAG
AAGGTGATTGTGAAGAAGAAGAGTTTGAGCCATCGACTCAATATGAGTATGGTA
CTGAAGATGATTACCAAGGTAAACCTTTGGAATTTGGTGCCACTTCTGCTGCTCT
TCAACCTGAAGAAGAGCAAGAAGAAGATTGGTTAGATGATGATTCGCAACAAAC
TGTTGGTCAACAAGACGGCAGTGAGGACAATCAGACAACTACTATTCAAACAAT
TGTTGAGGTTCAACCTCAATTAGAGATGGAACTTACACCAGTTGTTCAGACTATT
GAAGTGAATTCGTTTAGTGGTTATTTAAAACTTACTGACAATGTATACATTAAAA
ATGCAGACATTGTGGAAGAAGCTAAAAAGGTAAAACCAACAGTGGTTGTTAATG
CAGCCAATGTTTACCTTAAACATGGAGGAGGTGTTGCAGGAGCCTTAAATAAGG
CTACTAACAATGCCATGCAAGTTGAATCGGATGATTACATAGCTACTAATGGACC
ACTTAAAGTGGGTGGTTCGTGTGTTTTAAGCGGACACAATCTTGCTAAACACTGT
CTTCATGTTGTCGGCCCAAATGTTAACAAAGGTGAAGACATTCAACTTCTTAAGT
CGGCTTATGAAAATTTTAATCAGCACGAAGTTCTACTTGCACCATTATTATCAGC
TGGTATTTTTGGTGCTGACCCTATACATTCGTTAAGAGTTTGTGTAGATACTGTTC
GCACAAATGTCTACTTAGCTGTCTTTGATAAAAATCTCTATGACAAACTTGTTTCA
TCGTTTTTGGAAATGAAGAGTGAAAAGCAAGTTGAACAAAAGATCGCTGAGATT
CCTAAAGAGGAAGTTAAGCCATTTATAACTGAATCGAAACCTTCAGTTGAACAG
AGAAAACAAGATGATAAGAAAATCAAAGCTTGTGTTGAAGAAGTTACAACAACT
CTGGAAGAAACTAAGTTCCTCACAGAAAACTTGTTACTTTATATTGACATTAATG
GCAATCTTCATCCAGATTCGGCCACTCTTGTTAGTGACATTGACATCACTTTCTTA
AAGAAAGATGCTCCATATATAGTGGGTGATGTTGTTCAAGAGGGTGTTTTAACTG
CTGTGGTTATACCTACTAAAAAGGCTGGTGGCACTACTGAAATGCTAGCGAAAG
CTTTGAGAAAAGTGCCAACAGACAATTATATAACCACTTACCCGGGTCAGGGTTT
AAATGGTTACACTGTAGAGGAGGCAAAGACAGTGCTTAAAAAGTGTAAATCGGC
CTTTTACATTCTACCATCTATTATCTCGAATGAGAAGCAAGAAATTCTTGGAACT
GTTTCTTGGAATTTGCGAGAAATGCTTGCACATGCAGAAGAAACACGCAAATTA
ATGCCTGTCTGTGTGGAAACTAAAGCCATAGTTTCGACTATACAGCGTAAATATA
AGGGTATTAAAATACAAGAGGGTGTGGTTGATTATGGTGCTAGATTTTACTTTTA
CACCAGTAAAACAACTGTAGCGTCGCTTATCAACACACTTAACGATCTAAATGA
AACTCTTGTTACAATGCCACTTGGCTATGTAACACATGGCTTAAATTTGGAAGAA
GCTGCTCGGTATATGAGATCTCTCAAAGTGCCAGCTACAGTTTCGGTTTCTTCGC
CTGATGCTGTTACAGCGTATAATGGTTATCTTACTTCTTCGTCTAAAACACCTGAA
GAACATTTTATTGAAACCATCTCACTTGCTGGTTCGTATAAAGATTGGTCCTATTC
GGGACAATCTACACAACTAGGTATAGAATTTCTTAAGAGAGGTGATAAATCGGT
ATATTACACTAGTAATCCTACCACATTCCACCTAGATGGTGAAGTTATCACCTTT
GACAATCTTAAGACACTTCTTTCGTTGAGAGAAGTGAGGACTATTAAGGTGTTTA
CAACAGTAGACAACATTAACCTCCACACGCAAGTTGTGGACATGTCAATGACAT
ATGGACAACAGTTTGGTCCAACTTATTTGGATGGAGCTGATGTTACTAAAATAAA
ACCTCATAATTCGCATGAAGGTAAAACATTTTATGTTTTACCTAATGATGACACT
CTACGTGTTGAGGCTTTTGAGTACTACCACACAACTGATCCTAGTTTTCTGGGTA
GGTACATGTCGGCATTAAATCACACTAAAAAGTGGAAATACCCACAAGTTAATG
GTTTAACTTCTATTAAATGGGCAGATAACAACTGTTATCTTGCCACTGCATTGTTA
ACACTCCAACAAATAGAGTTGAAGTTTAATCCACCTGCTCTACAAGATGCTTATT
ACAGAGCAAGGGCTGGTGAAGCTGCTAACTTTTGTGCACTTATCTTAGCCTACTG
TAATAAGACAGTAGGTGAGTTAGGTGATGTTAGAGAAACAATGTCGTACTTGTTT
CAACATGCCAATTTAGATTCTTGCAAAAGAGTCTTGAACGTGGTGTGTAAAACTT
GTGGACAACAGCAGACAACCCTTAAGGGTGTAGAAGCTGTTATGTACATGGGCA
CACTTTCGTATGAACAATTTAAGAAAGGTGTTCAGATACCTTGTACGTGTGGTAA
ACAAGCTACAAAATATCTAGTACAACAGGAGTCACCTTTTGTTATGATGTCGGCA
CCACCTGCTCAGTATGAACTTAAGCATGGTACATTTACTTGTGCTAGTGAGTACA
CTGGTAATTACCAGTGTGGTCACTATAAACATATAACTTCGAAAGAAACTTTGTA
TTGCATAGACGGTGCTTTACTTACAAAGTCCTCGGAATACAAAGGTCCTATTACG
GATGTTTTCTACAAAGAAAACAGTTACACAACAACCATAAAACCAGTTACTTATA
AATTGGATGGTGTTGTTTGTACAGAAATTGACCCTAAGTTGGACAATTATTATAA
GAAAGACAATTCGTATTTCACAGAGCAACCAATTGATCTTGTACCAAACCAACC
ATATCCAAACGCAAGCTTCGATAATTTTAAGTTTGTATGTGATAATATCAAATTT
GCTGATGATTTAAACCAGTTAACTGGTTATAAGAAACCTGCTTCGAGAGAGCTTA
AAGTTACATTTTTCCCTGACTTAAATGGTGATGTGGTGGCTATTGATTATAAACA
CTACACACCCTCTTTTAAGAAAGGAGCTAAATTGTTACATAAACCTATTGTTTGG
CATGTTAACAATGCAACTAATAAAGCCACGTATAAACCAAATACCTGGTGTATA
CGTTGTCTTTGGTCGACAAAACCAGTTGAAACATCAAATTCGTTTGATGTACTGA
AGTCAGAGGACGCGCAGGGAATGGATAATCTTGCCTGCGAAGATCTAAAACCAG
TCTCGGAAGAAGTAGTGGAAAATCCTACCATACAGAAAGACGTTCTTGAGTGTA
ATGTGAAAACTACCGAAGTTGTAGGAGACATTATACTTAAACCAGCAAATAATA
GTTTAAAAATTACAGAAGAGGTTGGCCACACAGATCTAATGGCTGCTTATGTAGA
CAATTCGAGTCTTACTATTAAGAAACCTAATGAATTATCTAGAGTATTAGGTTTG
AAAACCCTTGCTACTCATGGTTTAGCTGCTGTTAATTCGGTCCCTTGGGATACTAT
AGCTAATTATGCTAAGCCTTTTCTTAACAAAGTTGTTAGTACAACTACTAACATA
GTTACACGGTGTTTAAACCGTGTTTGTACTAATTATATGCCTTATTTCTTTACTTT
ATTGCTACAATTGTGTACTTTTACTAGATCGACAAATTCTAGAATTAAAGCATCG
ATGCCGACTACTATAGCAAAGAATACTGTTAAGAGTGTCGGTAAATTTTGTCTAG
AGGCTTCGTTTAATTATTTGAAGTCACCTAATTTTTCGAAACTGATAAATATTATA
ATTTGGTTTTTACTATTAAGTGTTTGCCTAGGTTCTTTAATCTACTCAACCGCTGC
TTTAGGTGTTTTAATGTCTAATTTAGGCATGCCTTCTTACTGTACTGGTTACAGAG
AAGGCTATTTGAACTCTACTAATGTCACTATTGCAACCTACTGTACTGGTTCTATA
CCTTGTAGTGTTTGTCTTAGTGGTTTAGATTCTTTAGACACCTATCCTTCTTTAGA
AACTATACAAATTACCATTTCATCTTTTAAATGGGATTTAACTGCTTTTGGCTTAG
TTGCAGAGTGGTTTTTGGCATATATTCTTTTCACTAGGTTTTTCTATGTACTTGGA
TTGGCTGCAATCATGCAATTGTTTTTCAGCTATTTTGCAGTACATTTTATTAGTAA
TTCTTGGCTTATGTGGTTAATAATTAATCTTGTACAAATGGCCCCGATTTCAGCTA
TGGTTAGAATGTACATCTTCTTTGCATCATTTTATTATGTATGGAAAAGTTATGTG
CATGTTGTAGACGGTTGTAATTCATCAACTTGTATGATGTGTTACAAACGTAATA
GAGCAACAAGAGTCGAATGTACAACTATTGTTAATGGTGTTAGAAGGTCCTTTTA
TGTCTATGCTAATGGAGGTAAAGGCTTTTGCAAACTACACAATTGGAATTGTGTT
AATTGTGATACATTCTGTGCTGGTAGTACATTTATTAGTGATGAAGTTGCGAGAG
ACTTGTCACTACAGTTTAAAAGACCAATAAATCCTACTGACCAGTCTTCTTACAT
CGTTGATAGTGTTACAGTGAAGAATGGTTCCATCCATCTTTACTTTGATAAAGCT
GGTCAAAAGACTTATGAAAGACATTCTCTCTCTCATTTTGTTAACTTAGACAACC
TGAGAGCTAATAACACTAAAGGTTCATTGCCTATTAATGTTATAGTTTTTGATGG
TAAATCAAAATGTGAAGAATCATCTGCAAAATCAGCGTCTGTTTACTACAGTCAG
CTTATGTGTCAACCTATACTGTTACTAGATCAGGCATTAGTGTCTGATGTTGGTGA
TAGTGCGGAAGTTGCAGTTAAAATGTTTGATGCTTACGTTAATACGTTTTCATCA
ACTTTTAACGTACCAATGGAAAAACTCAAAACACTAGTTGCAACTGCAGAAGCT
GAACTTGCAAAGAATGTGTCCTTAGACAATGTCTTATCTACTTTTATTTCAGCAGC
TCGGCAAGGGTTTGTTGATTCAGATGTAGAAACTAAAGATGTTGTTGAATGTCTT
AAATTGTCACATCAATCTGACATAGAAGTTACTGGCGATAGTTGTAATAACTATA
TGCTCACCTATAACAAAGTTGAAAACATGACACCCCGTGACCTTGGTGCTTGTAT
TGACTGTAGTGCGCGTCATATTAATGCGCAGGTAGCAAAAAGTCACAACATTGCT
TTGATATGGAACGTTAAAGATTTCATGTCATTGTCTGAACAACTACGAAAACAAA
TACGTAGTGCTGCTAAAAAGAATAACTTACCTTTTAAGTTGACATGTGCAACTAC
TAGACAAGTTGTTAATGTTGTAACAACAAAGATAGCACTTAAGGGTGGTAAAAT
TGTTAATAATTGGTTGAAGCAGTTAATTAAA
SEQ ID NO: 43 - Clone pCC1-4K-SARS-COV-2-77-5. Only fragments 1 and 3
have been deoptimized:
GGGTCCCACGTGCTAGCGCTAACATAGGTTGTAACCATACAGGTGTTG
TTGGAGAAGGTTCGGAAGGTCTTAATGACAACCTTCTTGAAATACTCCAAAAAG
AGAAAGTCAACATCAATATTGTTGGTGACTTTAAACTTAATGAAGAGATCGCCAT
TATTTTGGCATCTTTTTCGGCTTCCACATCGGCTTTTGTGGAAACTGTGAAAGGTT
TGGATTATAAAGCATTCAAACAAATTGTTGAATCCTGTGGTAATTTTAAAGTTAC
AAAAGGAAAAGCTAAAAAAGGTGCCTGGAATATTGGTGAACAGAAATCGATACT
GAGTCCTCTTTATGCATTTGCATCGGAGGCTGCTCGTGTTGTACGATCAATTTTCT
CGCGCACTCTTGAAACTGCTCAAAATTCTGTGCGTGTTTTACAGAAGGCCGCTAT
AACAATACTAGATGGAATTTCGCAGTATTCACTGAGACTCATTGATGCTATGATG
TTCACATCGGATTTGGCTACTAACAATCTAGTTGTAATGGCCTACATTACAGGTG
GTGTTGTTCAGTTGACTTCGCAGTGGCTAACTAACATCTTTGGCACTGTTTATGAA
AAACTCAAACCCGTCCTTGATTGGCTTGAAGAGAAGTTTAAGGAAGGTGTAGAG
TTTCTTAGAGACGGTTGGGAAATTGTTAAATTTATCTCAACCTGTGCTTGTGAAAT
TGTCGGTGGACAAATTGTCACCTGTGCAAAGGAAATTAAGGAGTCGGTTCAGAC
ATTCTTTAAGCTTGTAAATAAATTTTTGGCTTTGTGTGCTGACTCTATCATTATTG
GTGGAGCTAAACTTAAAGCCTTGAATTTAGGTGAAACATTTGTCACGCACTCGAA
GGGATTGTACAGAAAGTGTGTTAAATCCAGAGAAGAAACTGGCCTACTCATGCC
TCTAAAAGCCCCAAAAGAAATTATCTTCTTAGAGGGAGAAACACTTCCCACAGA
AGTGTTAACAGAGGAAGTTGTCTTGAAAACTGGTGATTTACAACCATTAGAACA
ACCTACTTCGGAAGCTGTTGAAGCTCCATTGGTTGGTACACCAGTTTGTATTAAC
GGGCTTATGTTGCTCGAAATCAAAGACACAGAAAAGTACTGTGCCCTTGCACCTA
ATATGATGGTAACAAACAATACCTTCACACTCAAAGGCGGTGCACCAACAAAGG
TTACTTTTGGTGATGACACTGTGATAGAAGTGCAAGGTTACAAGAGTGTGAATAT
CACTTTTGAACTTGATGAAAGGATTGATAAAGTACTTAATGAGAAGTGCTCGGCC
TATACAGTTGAACTCGGTACAGAAGTAAATGAGTTCGCCTGTGTTGTGGCAGATG
CTGTCATAAAAACTTTGCAACCAGTATCTGAATTACTTACACCACTGGGCATTGA
TTTAGATGAGTGGTCGATGGCTACATACTACTTATTTGATGAGTCTGGTGAGTTT
AAATTGGCTTCGCATATGTATTGTTCTTTCTACCCTCCAGATGAGGATGAAGAAG
AAGGTGATTGTGAAGAAGAAGAGTTTGAGCCATCGACTCAATATGAGTATGGTA
CTGAAGATGATTACCAAGGTAAACCTTTGGAATTTGGTGCCACTTCTGCTGCTCT
TCAACCTGAAGAAGAGCAAGAAGAAGATTGGTTAGATGATGATTCGCAACAAAC
TGTTGGTCAACAAGACGGCAGTGAGGACAATCAGACAACTACTATTCAAACAAT
TGTTGAGGTTCAACCTCAATTAGAGATGGAACTTACACCAGTTGTTCAGACTATT
GAAGTGAATTCGTTTAGTGGTTATTTAAAACTTACTGACAATGTATACATTAAAA
ATGCAGACATTGTGGAAGAAGCTAAAAAGGTAAAACCAACAGTGGTTGTTAATG
CAGCCAATGTTTACCTTAAACATGGAGGAGGTGTTGCAGGAGCCTTAAATAAGG
CTACTAACAATGCCATGCAAGTTGAATCGGATGATTACATAGCTACTAATGGACC
ACTTAAAGTGGGTGGTTCGTGTGTTTTAAGCGGACACAATCTTGCTAAACACTGT
CTTCATGTTGTCGGCCCAAATGTTAACAAAGGTGAAGACATTCAACTTCTTAAGT
CGGCTTATGAAAATTTTAATCAGCACGAAGTTCTACTTGCACCATTATTATCAGC
TGGTATTTTTGGTGCTGACCCTATACATTCGTTAAGAGTTTGTGTAGATACTGTTC
GCACAAATGTCTACTTAGCTGTCTTTGATAAAAATCTCTATGACAAACTTGTTTCA
TCGTTTTTGGAAATGAAGAGTGAAAAGCAAGTTGAACAAAAGATCGCTGAGATT
CCTAAAGAGGAAGTTAAGCCATTTATAACTGAATCGAAACCTTCAGTTGAACAG
AGAAAACAAGATGATAAGAAAATCAAAGCTTGTGTTGAAGAAGTTACAACAACT
CTGGAAGAAACTAAGTTCCTCACAGAAAACTTGTTACTTTATATTGACATTAATG
GCAATCTTCATCCAGATTCGGCCACTCTTGTTAGTGACATTGACATCACTTTCTTA
AAGAAAGATGCTCCATATATAGTGGGTGATGTTGTTCAAGAGGGTGTTTTAACTG
CTGTGGTTATACCTACTAAAAAGGCTGGTGGCACTACTGAAATGCTAGCGAAAG
CTTTGAGAAAAGTGCCAACAGACAATTATATAACCACTTACCCGGGTCAGGGTTT
AAATGGTTACACTGTAGAGGAGGCAAAGACAGTGCTTAAAAAGTGTAAAAGTGC
CTTTTACATTCTACCATCTATTATCTCTAATGAGAAGCAAGAAATTCTTGGAACTG
TTTCTTGGAATTTGCGAGAAATGCTTGCACATGCAGAAGAAACACGCAAATTAAT
GCCTGTCTGTGTGGAAACTAAAGCCATAGTTTCAACTATACAGCGTAAATATAAG
GGTATTAAAATACAAGAGGGTGTGGTTGATTATGGTGCTAGATTTTACTTTTACA
CCAGTAAAACAACTGTAGCGTCACTTATCAACACACTTAACGATCTAAATGAAA
CTCTTGTTACAATGCCACTTGGCTATGTAACACATGGCTTAAATTTGGAAGAAGC
TGCTCGGTATATGAGATCTCTCAAAGTGCCAGCTACAGTTTCTGTTTCTTCACCTG
ATGCTGTTACAGCGTATAATGGTTATCTTACTTCTTCTTCTAAAACACCTGAAGAA
CATTTTATTGAAACCATCTCACTTGCTGGTTCCTATAAAGATTGGTCCTATTCTGG
ACAATCTACACAACTAGGTATAGAATTTCTTAAGAGAGGTGATAAAAGTGTATAT
TACACTAGTAATCCTACCACATTCCACCTAGATGGTGAAGTTATCACCTTTGACA
ATCTTAAGACACTTCTTTCTTTGAGAGAAGTGAGGACTATTAAGGTGTTTACAAC
AGTAGACAACATTAACCTCCACACGCAAGTTGTGGACATGTCAATGACATATGG
ACAACAGTTTGGTCCAACTTATTTGGATGGAGCTGATGTTACTAAAATAAAACCT
CATAATTCACATGAAGGTAAAACATTTTATGTTTTACCTAATGATGACACTCTAC
GTGTTGAGGCTTTTGAGTACTACCACACAACTGATCCTAGTTTTCTGGGTAGGTA
CATGTCAGCATTAAATCACACTAAAAAGTGGAAATACCCACAAGTTAATGGTTT
AACTTCTATTAAATGGGCAGATAACAACTGTTATCTTGCCACTGCATTGTTAACA
CTCCAACAAATAGAGTTGAAGTTTAATCCACCTGCTCTACAAGATGCTTATTACA
GAGCAAGGGCTGGTGAAGCTGCTAACTTTTGTGCACTTATCTTAGCCTACTGTAA
TAAGACAGTAGGTGAGTTAGGTGATGTTAGAGAAACAATGAGTTACTTGTTTCAA
CATGCCAATTTAGATTCTTGCAAAAGAGTCTTGAACGTGGTGTGTAAAACTTGTG
GACAACAGCAGACAACCCTTAAGGGTGTAGAAGCTGTTATGTACATGGGCACAC
TTTCTTATGAACAATTTAAGAAAGGTGTTCAGATACCTTGTACGTGTGGTAAACA
AGCTACAAAATATCTAGTACAACAGGAGTCACCTTTTGTTATGATGTCAGCACCA
CCTGCTCAGTATGAACTTAAGCATGGTACATTTACTTGTGCTAGTGAGTACACTG
GTAATTACCAGTGTGGTCACTATAAACATATAACTTCTAAAGAAACTTTGTATTG
CATAGACGGTGCTTTACTTACAAAGTCCTCAGAATACAAAGGTCCTATTACGGAT
GTTTTCTACAAAGAAAACAGTTACACAACAACCATAAAACCAGTTACTTATAAAT
TGGATGGTGTTGTTTGTACAGAAATTGACCCTAAGTTGGACAATTATTATAAGAA
AGACAATTCTTATTTCACAGAGCAACCAATTGATCTTGTACCAAACCAACCATAT
CCAAACGCAAGCTTCGATAATTTTAAGTTTGTATGTGATAATATCAAATTTGCTG
ATGATTTAAACCAGTTAACTGGTTATAAGAAACCTGCTTCAAGAGAGCTTAAAGT
TACATTTTTCCCTGACTTAAATGGTGATGTGGTGGCTATTGATTATAAACACTACA
CACCCTCTTTTAAGAAAGGAGCTAAATTGTTACATAAACCTATTGTTTGGCATGT
TAACAATGCAACTAATAAAGCCACGTATAAACCAAATACCTGGTGTATACGTTGT
CTTTGGAGCACAAAACCAGTTGAAACATCAAATTCGTTTGATGTACTGAAGTCAG
AGGACGCGCAGGGAATGGATAATCTTGCCTGCGAAGATCTAAAACCAGTCTCTG
AAGAAGTAGTGGAAAATCCTACCATACAGAAAGACGTTCTTGAGTGTAATGTGA
AAACTACCGAAGTTGTAGGAGACATTATACTTAAACCAGCAAATAATAGTTTAA
AAATTACAGAAGAGGTTGGCCACACAGATCTAATGGCTGCTTATGTAGACAATT
CTAGTCTTACTATTAAGAAACCTAATGAATTATCTAGAGTATTAGGTTTGAAAAC
CCTTGCTACTCATGGTTTAGCTGCTGTTAATAGTGTCCCTTGGGATACTATAGCTA
ATTATGCTAAGCCTTTTCTTAACAAAGTTGTTAGTACAACTACTAACATAGTTAC
ACGGTGTTTAAACCGTGTTTGTACTAATTATATGCCTTATTTCTTTACTTTATTGCT
ACAATTGTGTACTTTTACTAGAAGTACAAATTCTAGAATTAAAGCATCTATGCCG
ACTACTATAGCAAAGAATACTGTTAAGAGTGTCGGTAAATTTTGTCTAGAGGCTT
CATTTAATTATTTGAAGTCACCTAATTTTTCTAAACTGATAAATATTATAATTTGG
TTTTTACTATTAAGTGTTTGCCTAGGTTCGTTAATCTACTCAACCGCTGCTTTAGG
TGTTTTAATGTCGAATTTAGGCATGCCTTCTTACTGTACTGGTTACAGAGAAGGCT
ATTTGAACTCGACTAATGTCACTATTGCAACCTACTGTACTGGTTCTATACCTTGT
TCGGTTTGTCTTAGTGGTTTAGATTCTTTAGACACCTATCCTTCGTTAGAAACTAT
ACAAATTACCATTTCATCTTTTAAATGGGATTTAACTGCTTTTGGCTTAGTTGCAG
AGTGGTTTTTGGCATATATTCTTTTCACTAGGTTTTTCTATGTACTTGGATTGGCT
GCAATCATGCAATTGTTTTTCTCGTATTTTGCAGTACATTTTATTAGTAATTCGTG
GCTTATGTGGTTAATAATTAATCTTGTACAAATGGCCCCGATTTCAGCTATGGTTA
GAATGTACATCTTCTTTGCATCGTTTTATTATGTATGGAAAAGTTATGTGCATGTT
GTAGACGGTTGTAATTCGTCAACTTGTATGATGTGTTACAAACGTAATAGAGCAA
CAAGAGTCGAATGTACAACTATTGTTAATGGTGTTAGAAGGTCGTTTTATGTCTA
TGCTAATGGAGGTAAAGGCTTTTGCAAACTACACAATTGGAATTGTGTTAATTGT
GATACATTCTGTGCTGGTAGTACATTTATTTCGGATGAAGTTGCGAGAGACTTGT
CACTACAGTTTAAAAGACCAATAAATCCTACTGACCAGTCGTCTTACATCGTTGA
TAGTGTTACAGTGAAGAATGGTTCGATCCATCTTTACTTTGATAAAGCTGGTCAA
AAGACTTATGAAAGACATTCTCTCTCGCATTTTGTTAACTTAGACAACCTGAGAG
CTAATAACACTAAAGGTTCATTGCCTATTAATGTTATAGTTTTTGATGGTAAATCG
AAATGTGAAGAATCATCGGCAAAATCAGCGTCGGTTTACTACAGTCAGCTTATGT
GTCAACCTATACTGTTACTAGATCAGGCATTAGTGTCGGATGTTGGTGATAGTGC
GGAAGTTGCAGTTAAAATGTTTGATGCTTACGTTAATACGTTTTCGTCAACTTTTA
ACGTACCAATGGAAAAACTCAAAACACTAGTTGCAACTGCAGAAGCTGAACTTG
CAAAGAATGTGTCCTTAGACAATGTCTTATCGACTTTTATTTCAGCAGCTCGGCA
AGGGTTTGTTGATTCGGATGTAGAAACTAAAGATGTTGTTGAATGTCTTAAATTG
TCACATCAATCGGACATAGAAGTTACTGGCGATAGTTGTAATAACTATATGCTCA
CCTATAACAAAGTTGAAAACATGACACCCCGTGACCTTGGTGCTTGTATTGACTG
TTCGGCGCGTCATATTAATGCGCAGGTAGCAAAAAGTCACAACATTGCTTTGATA
TGGAACGTTAAAGATTTCATGTCGTTGTCTGAACAACTACGAAAACAAATACGTT
CGGCTGCTAAAAAGAATAACTTACCTTTTAAGTTGACATGTGCAACTACTAGACA
AGTTGTTAATGTTGTAACAACAAAGATAGCACTTAAGGGTGGTAAAATTGTTAAT
AATTGGTTGAAGCAGTTAATTAAA
SEQ ID NO: 44 - Clone pCC1-4K-SARS-COV-2-77-6. Only fragments 2 and 3
have been deoptimized:
GGGTCCCACGTGCTAGCGCTAACATAGGTTGTAACCATACAGGTGTTG
TTGGAGAAGGTTCCGAAGGTCTTAATGACAACCTTCTTGAAATACTCCAAAAAG
AGAAAGTCAACATCAATATTGTTGGTGACTTTAAACTTAATGAAGAGATCGCCAT
TATTTTGGCATCTTTTTCTGCTTCCACAAGTGCTTTTGTGGAAACTGTGAAAGGTT
TGGATTATAAAGCATTCAAACAAATTGTTGAATCCTGTGGTAATTTTAAAGTTAC
AAAAGGAAAAGCTAAAAAAGGTGCCTGGAATATTGGTGAACAGAAATCAATACT
GAGTCCTCTTTATGCATTTGCATCAGAGGCTGCTCGTGTTGTACGATCAATTTTCT
CCCGCACTCTTGAAACTGCTCAAAATTCTGTGCGTGTTTTACAGAAGGCCGCTAT
AACAATACTAGATGGAATTTCACAGTATTCACTGAGACTCATTGATGCTATGATG
TTCACATCTGATTTGGCTACTAACAATCTAGTTGTAATGGCCTACATTACAGGTG
GTGTTGTTCAGTTGACTTCGCAGTGGCTAACTAACATCTTTGGCACTGTTTATGAA
AAACTCAAACCCGTCCTTGATTGGCTTGAAGAGAAGTTTAAGGAAGGTGTAGAG
TTTCTTAGAGACGGTTGGGAAATTGTTAAATTTATCTCAACCTGTGCTTGTGAAAT
TGTCGGTGGACAAATTGTCACCTGTGCAAAGGAAATTAAGGAGAGTGTTCAGAC
ATTCTTTAAGCTTGTAAATAAATTTTTGGCTTTGTGTGCTGACTCTATCATTATTG
GTGGAGCTAAACTTAAAGCCTTGAATTTAGGTGAAACATTTGTCACGCACTCAAA
GGGATTGTACAGAAAGTGTGTTAAATCCAGAGAAGAAACTGGCCTACTCATGCC
TCTAAAAGCCCCAAAAGAAATTATCTTCTTAGAGGGAGAAACACTTCCCACAGA
AGTGTTAACAGAGGAAGTTGTCTTGAAAACTGGTGATTTACAACCATTAGAACA
ACCTACTAGTGAAGCTGTTGAAGCTCCATTGGTTGGTACACCAGTTTGTATTAAC
GGGCTTATGTTGCTCGAAATCAAAGACACAGAAAAGTACTGTGCCCTTGCACCTA
ATATGATGGTAACAAACAATACCTTCACACTCAAAGGCGGTGCACCAACAAAGG
TTACTTTTGGTGATGACACTGTGATAGAAGTGCAAGGTTACAAGAGTGTGAATAT
CACTTTTGAACTTGATGAAAGGATTGATAAAGTACTTAATGAGAAGTGCTCTGCC
TATACAGTTGAACTCGGTACAGAAGTAAATGAGTTCGCCTGTGTTGTGGCAGATG
CTGTCATAAAAACTTTGCAACCAGTATCTGAATTACTTACACCACTGGGCATTGA
TTTAGATGAGTGGAGTATGGCTACATACTACTTATTTGATGAGTCTGGTGAGTTT
AAATTGGCTTCACATATGTATTGTTCTTTCTACCCTCCAGATGAGGATGAAGAAG
AAGGTGATTGTGAAGAAGAAGAGTTTGAGCCATCAACTCAATATGAGTATGGTA
CTGAAGATGATTACCAAGGTAAACCTTTGGAATTTGGTGCCACTTCTGCTGCTCT
TCAACCTGAAGAAGAGCAAGAAGAAGATTGGTTAGATGATGATAGTCAACAAAC
TGTTGGTCAACAAGACGGCAGTGAGGACAATCAGACAACTACTATTCAAACAAT
TGTTGAGGTTCAACCTCAATTAGAGATGGAACTTACACCAGTTGTTCAGACTATT
GAAGTGAATAGTTTTAGTGGTTATTTAAAACTTACTGACAATGTATACATTAAAA
ATGCAGACATTGTGGAAGAAGCTAAAAAGGTAAAACCAACAGTGGTTGTTAATG
CAGCCAATGTTTACCTTAAACATGGAGGAGGTGTTGCAGGAGCCTTAAATAAGG
CTACTAACAATGCCATGCAAGTTGAATCTGATGATTACATAGCTACTAATGGACC
ACTTAAAGTGGGTGGTAGTTGTGTTTTAAGCGGACACAATCTTGCTAAACACTGT
CTTCATGTTGTCGGCCCAAATGTTAACAAAGGTGAAGACATTCAACTTCTTAAGA
GTGCTTATGAAAATTTTAATCAGCACGAAGTTCTACTTGCACCATTATTATCAGCT
GGTATTTTTGGTGCTGACCCTATACATTCTTTAAGAGTTTGTGTAGATACTGTTCG
CACAAATGTCTACTTAGCTGTCTTTGATAAAAATCTCTATGACAAACTTGTTTCAA
GCTTTTTGGAAATGAAGAGTGAAAAGCAAGTTGAACAAAAGATCGCTGAGATTC
CTAAAGAGGAAGTTAAGCCATTTATAACTGAAAGTAAACCTTCAGTTGAACAGA
GAAAACAAGATGATAAGAAAATCAAAGCTTGTGTTGAAGAAGTTACAACAACTC
TGGAAGAAACTAAGTTCCTCACAGAAAACTTGTTACTTTATATTGACATTAATGG
CAATCTTCATCCAGATTCTGCCACTCTTGTTAGTGACATTGACATCACTTTCTTAA
AGAAAGATGCTCCATATATAGTGGGTGATGTTGTTCAAGAGGGTGTTTTAACTGC
TGTGGTTATACCTACTAAAAAGGCTGGTGGCACTACTGAAATGCTAGCGAAAGC
TTTGAGAAAAGTGCCAACAGACAATTATATAACCACTTACCCGGGTCAGGGTTTA
AATGGTTACACTGTAGAGGAGGCAAAGACAGTGCTTAAAAAGTGTAAATCGGCC
TTTTACATTCTACCATCTATTATCTCGAATGAGAAGCAAGAAATTCTTGGAACTG
TTTCTTGGAATTTGCGAGAAATGCTTGCACATGCAGAAGAAACACGCAAATTAAT
GCCTGTCTGTGTGGAAACTAAAGCCATAGTTTCGACTATACAGCGTAAATATAAG
GGTATTAAAATACAAGAGGGTGTGGTTGATTATGGTGCTAGATTTTACTTTTACA
CCAGTAAAACAACTGTAGCGTCGCTTATCAACACACTTAACGATCTAAATGAAA
CTCTTGTTACAATGCCACTTGGCTATGTAACACATGGCTTAAATTTGGAAGAAGC
TGCTCGGTATATGAGATCTCTCAAAGTGCCAGCTACAGTTTCGGTTTCTTCGCCTG
ATGCTGTTACAGCGTATAATGGTTATCTTACTTCTTCGTCTAAAACACCTGAAGA
ACATTTTATTGAAACCATCTCACTTGCTGGTTCGTATAAAGATTGGTCCTATTCGG
GACAATCTACACAACTAGGTATAGAATTTCTTAAGAGAGGTGATAAATCGGTAT
ATTACACTAGTAATCCTACCACATTCCACCTAGATGGTGAAGTTATCACCTTTGA
CAATCTTAAGACACTTCTTTCGTTGAGAGAAGTGAGGACTATTAAGGTGTTTACA
ACAGTAGACAACATTAACCTCCACACGCAAGTTGTGGACATGTCAATGACATAT
GGACAACAGTTTGGTCCAACTTATTTGGATGGAGCTGATGTTACTAAAATAAAAC
CTCATAATTCGCATGAAGGTAAAACATTTTATGTTTTACCTAATGATGACACTCT
ACGTGTTGAGGCTTTTGAGTACTACCACACAACTGATCCTAGTTTTCTGGGTAGG
TACATGTCGGCATTAAATCACACTAAAAAGTGGAAATACCCACAAGTTAATGGT
TTAACTTCTATTAAATGGGCAGATAACAACTGTTATCTTGCCACTGCATTGTTAAC
ACTCCAACAAATAGAGTTGAAGTTTAATCCACCTGCTCTACAAGATGCTTATTAC
AGAGCAAGGGCTGGTGAAGCTGCTAACTTTTGTGCACTTATCTTAGCCTACTGTA
ATAAGACAGTAGGTGAGTTAGGTGATGTTAGAGAAACAATGTCGTACTTGTTTCA
ACATGCCAATTTAGATTCTTGCAAAAGAGTCTTGAACGTGGTGTGTAAAACTTGT
GGACAACAGCAGACAACCCTTAAGGGTGTAGAAGCTGTTATGTACATGGGCACA
CTTTCGTATGAACAATTTAAGAAAGGTGTTCAGATACCTTGTACGTGTGGTAAAC
AAGCTACAAAATATCTAGTACAACAGGAGTCACCTTTTGTTATGATGTCGGCACC
ACCTGCTCAGTATGAACTTAAGCATGGTACATTTACTTGTGCTAGTGAGTACACT
GGTAATTACCAGTGTGGTCACTATAAACATATAACTTCGAAAGAAACTTTGTATT
GCATAGACGGTGCTTTACTTACAAAGTCCTCGGAATACAAAGGTCCTATTACGGA
TGTTTTCTACAAAGAAAACAGTTACACAACAACCATAAAACCAGTTACTTATAAA
TTGGATGGTGTTGTTTGTACAGAAATTGACCCTAAGTTGGACAATTATTATAAGA
AAGACAATTCGTATTTCACAGAGCAACCAATTGATCTTGTACCAAACCAACCATA
TCCAAACGCAAGCTTCGATAATTTTAAGTTTGTATGTGATAATATCAAATTTGCT
GATGATTTAAACCAGTTAACTGGTTATAAGAAACCTGCTTCGAGAGAGCTTAAAG
TTACATTTTTCCCTGACTTAAATGGTGATGTGGTGGCTATTGATTATAAACACTAC
ACACCCTCTTTTAAGAAAGGAGCTAAATTGTTACATAAACCTATTGTTTGGCATG
TTAACAATGCAACTAATAAAGCCACGTATAAACCAAATACCTGGTGTATACGTTG
TCTTTGGTCGACAAAACCAGTTGAAACATCAAATTCGTTTGATGTACTGAAGTCA
GAGGACGCGCAGGGAATGGATAATCTTGCCTGCGAAGATCTAAAACCAGTCTCG
GAAGAAGTAGTGGAAAATCCTACCATACAGAAAGACGTTCTTGAGTGTAATGTG
AAAACTACCGAAGTTGTAGGAGACATTATACTTAAACCAGCAAATAATAGTTTA
AAAATTACAGAAGAGGTTGGCCACACAGATCTAATGGCTGCTTATGTAGACAAT
TCGAGTCTTACTATTAAGAAACCTAATGAATTATCTAGAGTATTAGGTTTGAAAA
CCCTTGCTACTCATGGTTTAGCTGCTGTTAATTCGGTCCCTTGGGATACTATAGCT
AATTATGCTAAGCCTTTTCTTAACAAAGTTGTTAGTACAACTACTAACATAGTTA
CACGGTGTTTAAACCGTGTTTGTACTAATTATATGCCTTATTTCTTTACTTTATTGC
TACAATTGTGTACTTTTACTAGATCGACAAATTCTAGAATTAAAGCATCGATGCC
GACTACTATAGCAAAGAATACTGTTAAGAGTGTCGGTAAATTTTGTCTAGAGGCT
TCGTTTAATTATTTGAAGTCACCTAATTTTTCGAAACTGATAAATATTATAATTTG
GTTTTTACTATTAAGTGTTTGCCTAGGTTCGTTAATCTACTCAACCGCTGCTTTAG
GTGTTTTAATGTCGAATTTAGGCATGCCTTCTTACTGTACTGGTTACAGAGAAGG
CTATTTGAACTCGACTAATGTCACTATTGCAACCTACTGTACTGGTTCTATACCTT
GTTCGGTTTGTCTTAGTGGTTTAGATTCTTTAGACACCTATCCTTCGTTAGAAACT
ATACAAATTACCATTTCATCTTTTAAATGGGATTTAACTGCTTTTGGCTTAGTTGC
AGAGTGGTTTTTGGCATATATTCTTTTCACTAGGTTTTTCTATGTACTTGGATTGG
CTGCAATCATGCAATTGTTTTTCTCGTATTTTGCAGTACATTTTATTAGTAATTCG
TGGCTTATGTGGTTAATAATTAATCTTGTACAAATGGCCCCGATTTCAGCTATGGT
TAGAATGTACATCTTCTTTGCATCGTTTTATTATGTATGGAAAAGTTATGTGCATG
TTGTAGACGGTTGTAATTCGTCAACTTGTATGATGTGTTACAAACGTAATAGAGC
AACAAGAGTCGAATGTACAACTATTGTTAATGGTGTTAGAAGGTCGTTTTATGTC
TATGCTAATGGAGGTAAAGGCTTTTGCAAACTACACAATTGGAATTGTGTTAATT
GTGATACATTCTGTGCTGGTAGTACATTTATTTCGGATGAAGTTGCGAGAGACTT
GTCACTACAGTTTAAAAGACCAATAAATCCTACTGACCAGTCGTCTTACATCGTT
GATAGTGTTACAGTGAAGAATGGTTCGATCCATCTTTACTTTGATAAAGCTGGTC
AAAAGACTTATGAAAGACATTCTCTCTCGCATTTTGTTAACTTAGACAACCTGAG
AGCTAATAACACTAAAGGTTCATTGCCTATTAATGTTATAGTTTTTGATGGTAAA
TCGAAATGTGAAGAATCATCGGCAAAATCAGCGTCGGTTTACTACAGTCAGCTTA
TGTGTCAACCTATACTGTTACTAGATCAGGCATTAGTGTCGGATGTTGGTGATAG
TGCGGAAGTTGCAGTTAAAATGTTTGATGCTTACGTTAATACGTTTTCGTCAACTT
TTAACGTACCAATGGAAAAACTCAAAACACTAGTTGCAACTGCAGAAGCTGAAC
TTGCAAAGAATGTGTCCTTAGACAATGTCTTATCGACTTTTATTTCAGCAGCTCGG
CAAGGGTTTGTTGATTCGGATGTAGAAACTAAAGATGTTGTTGAATGTCTTAAAT
TGTCACATCAATCGGACATAGAAGTTACTGGCGATAGTTGTAATAACTATATGCT
CACCTATAACAAAGTTGAAAACATGACACCCCGTGACCTTGGTGCTTGTATTGAC
TGTTCGGCGCGTCATATTAATGCGCAGGTAGCAAAAAGTCACAACATTGCTTTGA
TATGGAACGTTAAAGATTTCATGTCGTTGTCTGAACAACTACGAAAACAAATACG
TTCGGCTGCTAAAAAGAATAACTTACCTTTTAAGTTGACATGTGCAACTACTAGA
CAAGTTGTTAATGTTGTAACAACAAAGATAGCACTTAAGGGTGGTAAAATTGTTA
ATAATTGGTTGAAGCAGTTAATTAAA
SEQ ID NO: 45 - Clone pCC1-4K-SARS-COV-2-77-7. All 3 fragments were
deoptimized. Deoptimized sequence between SanDI to PacI in ORF1a:
GGGTCCCACGTGCTAGCGCTAACATAGGTTGTAACCATACAGGTGTTG
TTGGAGAAGGTTCGGAAGGTCTTAATGACAACCTTCTTGAAATACTCCAAAAAG
AGAAAGTCAACATCAATATTGTTGGTGACTTTAAACTTAATGAAGAGATCGCCAT
TATTTTGGCATCTTTTTCGGCTTCCACATCGGCTTTTGTGGAAACTGTGAAAGGTT
TGGATTATAAAGCATTCAAACAAATTGTTGAATCCTGTGGTAATTTTAAAGTTAC
AAAAGGAAAAGCTAAAAAAGGTGCCTGGAATATTGGTGAACAGAAATCGATACT
GAGTCCTCTTTATGCATTTGCATCGGAGGCTGCTCGTGTTGTACGATCAATTTTCT
CGCGCACTCTTGAAACTGCTCAAAATTCTGTGCGTGTTTTACAGAAGGCCGCTAT
AACAATACTAGATGGAATTTCGCAGTATTCACTGAGACTCATTGATGCTATGATG
TTCACATCGGATTTGGCTACTAACAATCTAGTTGTAATGGCCTACATTACAGGTG
GTGTTGTTCAGTTGACTTCGCAGTGGCTAACTAACATCTTTGGCACTGTTTATGAA
AAACTCAAACCCGTCCTTGATTGGCTTGAAGAGAAGTTTAAGGAAGGTGTAGAG
TTTCTTAGAGACGGTTGGGAAATTGTTAAATTTATCTCAACCTGTGCTTGTGAAAT
TGTCGGTGGACAAATTGTCACCTGTGCAAAGGAAATTAAGGAGTCGGTTCAGAC
ATTCTTTAAGCTTGTAAATAAATTTTTGGCTTTGTGTGCTGACTCTATCATTATTG
GTGGAGCTAAACTTAAAGCCTTGAATTTAGGTGAAACATTTGTCACGCACTCGAA
GGGATTGTACAGAAAGTGTGTTAAATCCAGAGAAGAAACTGGCCTACTCATGCC
TCTAAAAGCCCCAAAAGAAATTATCTTCTTAGAGGGAGAAACACTTCCCACAGA
AGTGTTAACAGAGGAAGTTGTCTTGAAAACTGGTGATTTACAACCATTAGAACA
ACCTACTTCGGAAGCTGTTGAAGCTCCATTGGTTGGTACACCAGTTTGTATTAAC
GGGCTTATGTTGCTCGAAATCAAAGACACAGAAAAGTACTGTGCCCTTGCACCTA
ATATGATGGTAACAAACAATACCTTCACACTCAAAGGCGGTGCACCAACAAAGG
TTACTTTTGGTGATGACACTGTGATAGAAGTGCAAGGTTACAAGAGTGTGAATAT
CACTTTTGAACTTGATGAAAGGATTGATAAAGTACTTAATGAGAAGTGCTCGGCC
TATACAGTTGAACTCGGTACAGAAGTAAATGAGTTCGCCTGTGTTGTGGCAGATG
CTGTCATAAAAACTTTGCAACCAGTATCTGAATTACTTACACCACTGGGCATTGA
TTTAGATGAGTGGTCGATGGCTACATACTACTTATTTGATGAGTCTGGTGAGTTT
AAATTGGCTTCGCATATGTATTGTTCTTTCTACCCTCCAGATGAGGATGAAGAAG
AAGGTGATTGTGAAGAAGAAGAGTTTGAGCCATCGACTCAATATGAGTATGGTA
CTGAAGATGATTACCAAGGTAAACCTTTGGAATTTGGTGCCACTTCTGCTGCTCT
TCAACCTGAAGAAGAGCAAGAAGAAGATTGGTTAGATGATGATTCGCAACAAAC
TGTTGGTCAACAAGACGGCAGTGAGGACAATCAGACAACTACTATTCAAACAAT
TGTTGAGGTTCAACCTCAATTAGAGATGGAACTTACACCAGTTGTTCAGACTATT
GAAGTGAATTCGTTTAGTGGTTATTTAAAACTTACTGACAATGTATACATTAAAA
ATGCAGACATTGTGGAAGAAGCTAAAAAGGTAAAACCAACAGTGGTTGTTAATG
CAGCCAATGTTTACCTTAAACATGGAGGAGGTGTTGCAGGAGCCTTAAATAAGG
CTACTAACAATGCCATGCAAGTTGAATCGGATGATTACATAGCTACTAATGGACC
ACTTAAAGTGGGTGGTTCGTGTGTTTTAAGCGGACACAATCTTGCTAAACACTGT
CTTCATGTTGTCGGCCCAAATGTTAACAAAGGTGAAGACATTCAACTTCTTAAGT
CGGCTTATGAAAATTTTAATCAGCACGAAGTTCTACTTGCACCATTATTATCAGC
TGGTATTTTTGGTGCTGACCCTATACATTCGTTAAGAGTTTGTGTAGATACTGTTC
GCACAAATGTCTACTTAGCTGTCTTTGATAAAAATCTCTATGACAAACTTGTTTCA
TCGTTTTTGGAAATGAAGAGTGAAAAGCAAGTTGAACAAAAGATCGCTGAGATT
CCTAAAGAGGAAGTTAAGCCATTTATAACTGAATCGAAACCTTCAGTTGAACAG
AGAAAACAAGATGATAAGAAAATCAAAGCTTGTGTTGAAGAAGTTACAACAACT
CTGGAAGAAACTAAGTTCCTCACAGAAAACTTGTTACTTTATATTGACATTAATG
GCAATCTTCATCCAGATTCGGCCACTCTTGTTAGTGACATTGACATCACTTTCTTA
AAGAAAGATGCTCCATATATAGTGGGTGATGTTGTTCAAGAGGGTGTTTTAACTG
CTGTGGTTATACCTACTAAAAAGGCTGGTGGCACTACTGAAATGCTAGCGAAAG
CTTTGAGAAAAGTGCCAACAGACAATTATATAACCACTTACCCGGGTCAGGGTTT
AAATGGTTACACTGTAGAGGAGGCAAAGACAGTGCTTAAAAAGTGTAAATCGGC
CTTTTACATTCTACCATCTATTATCTCGAATGAGAAGCAAGAAATTCTTGGAACT
GTTTCTTGGAATTTGCGAGAAATGCTTGCACATGCAGAAGAAACACGCAAATTA
ATGCCTGTCTGTGTGGAAACTAAAGCCATAGTTTCGACTATACAGCGTAAATATA
AGGGTATTAAAATACAAGAGGGTGTGGTTGATTATGGTGCTAGATTTTACTTTTA
CACCAGTAAAACAACTGTAGCGTCGCTTATCAACACACTTAACGATCTAAATGA
AACTCTTGTTACAATGCCACTTGGCTATGTAACACATGGCTTAAATTTGGAAGAA
GCTGCTCGGTATATGAGATCTCTCAAAGTGCCAGCTACAGTTTCGGTTTCTTCGC
CTGATGCTGTTACAGCGTATAATGGTTATCTTACTTCTTCGTCTAAAACACCTGAA
GAACATTTTATTGAAACCATCTCACTTGCTGGTTCGTATAAAGATTGGTCCTATTC
GGGACAATCTACACAACTAGGTATAGAATTTCTTAAGAGAGGTGATAAATCGGT
ATATTACACTAGTAATCCTACCACATTCCACCTAGATGGTGAAGTTATCACCTTT
GACAATCTTAAGACACTTCTTTCGTTGAGAGAAGTGAGGACTATTAAGGTGTTTA
CAACAGTAGACAACATTAACCTCCACACGCAAGTTGTGGACATGTCAATGACAT
ATGGACAACAGTTTGGTCCAACTTATTTGGATGGAGCTGATGTTACTAAAATAAA
ACCTCATAATTCGCATGAAGGTAAAACATTTTATGTTTTACCTAATGATGACACT
CTACGTGTTGAGGCTTTTGAGTACTACCACACAACTGATCCTAGTTTTCTGGGTA
GGTACATGTCGGCATTAAATCACACTAAAAAGTGGAAATACCCACAAGTTAATG
GTTTAACTTCTATTAAATGGGCAGATAACAACTGTTATCTTGCCACTGCATTGTTA
ACACTCCAACAAATAGAGTTGAAGTTTAATCCACCTGCTCTACAAGATGCTTATT
ACAGAGCAAGGGCTGGTGAAGCTGCTAACTTTTGTGCACTTATCTTAGCCTACTG
TAATAAGACAGTAGGTGAGTTAGGTGATGTTAGAGAAACAATGTCGTACTTGTTT
CAACATGCCAATTTAGATTCTTGCAAAAGAGTCTTGAACGTGGTGTGTAAAACTT
GTGGACAACAGCAGACAACCCTTAAGGGTGTAGAAGCTGTTATGTACATGGGCA
CACTTTCGTATGAACAATTTAAGAAAGGTGTTCAGATACCTTGTACGTGTGGTAA
ACAAGCTACAAAATATCTAGTACAACAGGAGTCACCTTTTGTTATGATGTCGGCA
CCACCTGCTCAGTATGAACTTAAGCATGGTACATTTACTTGTGCTAGTGAGTACA
CTGGTAATTACCAGTGTGGTCACTATAAACATATAACTTCGAAAGAAACTTTGTA
TTGCATAGACGGTGCTTTACTTACAAAGTCCTCGGAATACAAAGGTCCTATTACG
GATGTTTTCTACAAAGAAAACAGTTACACAACAACCATAAAACCAGTTACTTATA
AATTGGATGGTGTTGTTTGTACAGAAATTGACCCTAAGTTGGACAATTATTATAA
GAAAGACAATTCGTATTTCACAGAGCAACCAATTGATCTTGTACCAAACCAACC
ATATCCAAACGCAAGCTTCGATAATTTTAAGTTTGTATGTGATAATATCAAATTT
GCTGATGATTTAAACCAGTTAACTGGTTATAAGAAACCTGCTTCGAGAGAGCTTA
AAGTTACATTTTTCCCTGACTTAAATGGTGATGTGGTGGCTATTGATTATAAACA
CTACACACCCTCTTTTAAGAAAGGAGCTAAATTGTTACATAAACCTATTGTTTGG
CATGTTAACAATGCAACTAATAAAGCCACGTATAAACCAAATACCTGGTGTATA
CGTTGTCTTTGGTCGACAAAACCAGTTGAAACATCAAATTCGTTTGATGTACTGA
AGTCAGAGGACGCGCAGGGAATGGATAATCTTGCCTGCGAAGATCTAAAACCAG
TCTCGGAAGAAGTAGTGGAAAATCCTACCATACAGAAAGACGTTCTTGAGTGTA
ATGTGAAAACTACCGAAGTTGTAGGAGACATTATACTTAAACCAGCAAATAATA
GTTTAAAAATTACAGAAGAGGTTGGCCACACAGATCTAATGGCTGCTTATGTAGA
CAATTCGAGTCTTACTATTAAGAAACCTAATGAATTATCTAGAGTATTAGGTTTG
AAAACCCTTGCTACTCATGGTTTAGCTGCTGTTAATTCGGTCCCTTGGGATACTAT
AGCTAATTATGCTAAGCCTTTTCTTAACAAAGTTGTTAGTACAACTACTAACATA
GTTACACGGTGTTTAAACCGTGTTTGTACTAATTATATGCCTTATTTCTTTACTTT
ATTGCTACAATTGTGTACTTTTACTAGATCGACAAATTCTAGAATTAAAGCATCG
ATGCCGACTACTATAGCAAAGAATACTGTTAAGAGTGTCGGTAAATTTTGTCTAG
AGGCTTCGTTTAATTATTTGAAGTCACCTAATTTTTCGAAACTGATAAATATTATA
ATTTGGTTTTTACTATTAAGTGTTTGCCTAGGTTCGTTAATCTACTCAACCGCTGC
TTTAGGTGTTTTAATGTCGAATTTAGGCATGCCTTCTTACTGTACTGGTTACAGAG
AAGGCTATTTGAACTCGACTAATGTCACTATTGCAACCTACTGTACTGGTTCTAT
ACCTTGTTCGGTTTGTCTTAGTGGTTTAGATTCTTTAGACACCTATCCTTCGTTAG
AAACTATACAAATTACCATTTCATCTTTTAAATGGGATTTAACTGCTTTTGGCTTA
GTTGCAGAGTGGTTTTTGGCATATATTCTTTTCACTAGGTTTTTCTATGTACTTGG
ATTGGCTGCAATCATGCAATTGTTTTTCTCGTATTTTGCAGTACATTTTATTAGTA
ATTCGTGGCTTATGTGGTTAATAATTAATCTTGTACAAATGGCCCCGATTTCAGCT
ATGGTTAGAATGTACATCTTCTTTGCATCGTTTTATTATGTATGGAAAAGTTATGT
GCATGTTGTAGACGGTTGTAATTCGTCAACTTGTATGATGTGTTACAAACGTAAT
AGAGCAACAAGAGTCGAATGTACAACTATTGTTAATGGTGTTAGAAGGTCGTTTT
ATGTCTATGCTAATGGAGGTAAAGGCTTTTGCAAACTACACAATTGGAATTGTGT
TAATTGTGATACATTCTGTGCTGGTAGTACATTTATTTCGGATGAAGTTGCGAGA
GACTTGTCACTACAGTTTAAAAGACCAATAAATCCTACTGACCAGTCGTCTTACA
TCGTTGATAGTGTTACAGTGAAGAATGGTTCGATCCATCTTTACTTTGATAAAGC
TGGTCAAAAGACTTATGAAAGACATTCTCTCTCGCATTTTGTTAACTTAGACAAC
CTGAGAGCTAATAACACTAAAGGTTCATTGCCTATTAATGTTATAGTTTTTGATG
GTAAATCGAAATGTGAAGAATCATCGGCAAAATCAGCGTCGGTTTACTACAGTC
AGCTTATGTGTCAACCTATACTGTTACTAGATCAGGCATTAGTGTCGGATGTTGG
TGATAGTGCGGAAGTTGCAGTTAAAATGTTTGATGCTTACGTTAATACGTTTTCG
TCAACTTTTAACGTACCAATGGAAAAACTCAAAACACTAGTTGCAACTGCAGAA
GCTGAACTTGCAAAGAATGTGTCCTTAGACAATGTCTTATCGACTTTTATTTCAGC
AGCTCGGCAAGGGTTTGTTGATTCGGATGTAGAAACTAAAGATGTTGTTGAATGT
CTTAAATTGTCACATCAATCGGACATAGAAGTTACTGGCGATAGTTGTAATAACT
ATATGCTCACCTATAACAAAGTTGAAAACATGACACCCCGTGACCTTGGTGCTTG
TATTGACTGTTCGGCGCGTCATATTAATGCGCAGGTAGCAAAAAGTCACAACATT
GCTTTGATATGGAACGTTAAAGATTTCATGTCGTTGTCTGAACAACTACGAAAAC
AAATACGTTCGGCTGCTAAAAAGAATAACTTACCTTTTAAGTTGACATGTGCAAC
TACTAGACAAGTTGTTAATGTTGTAACAACAAAGATAGCACTTAAGGGTGGTAA
AATTGTTAATAATTGGTTGAAGCAGTTAATTAAA
SEQ ID NO: 46 - Clone pCC1-4K-SARS-COV-2-160-1. Only fragment 3 has been
deoptimized:
GGGTCCCACGTGCTAGCGCTAACATAGGTTGTAACCATACAGGTGTTG
TTGGAGAAGGTTCCGAAGGTCTTAATGACAACCTTCTTGAAATACTCCAAAAAG
AGAAAGTCAACATCAATATTGTTGGTGACTTTAAACTTAATGAAGAGATCGCCAT
TATTTTGGCATCTTTTTCTGCTTCCACAAGTGCTTTTGTGGAAACTGTGAAAGGTT
TGGATTATAAAGCATTCAAACAAATTGTTGAATCCTGTGGTAATTTTAAAGTTAC
AAAAGGAAAAGCTAAAAAAGGTGCCTGGAATATTGGTGAACAGAAATCAATACT
GAGTCCTCTTTATGCATTTGCATCAGAGGCTGCTCGTGTTGTACGATCAATTTTCT
CCCGCACTCTTGAAACTGCTCAAAATTCTGTGCGTGTTTTACAGAAGGCCGCTAT
AACAATACTAGATGGAATTTCACAGTATTCACTGAGACTCATTGATGCTATGATG
TTCACATCTGATTTGGCTACTAACAATCTAGTTGTAATGGCCTACATTACAGGTG
GTGTTGTTCAGTTGACTTCGCAGTGGCTAACTAACATCTTTGGCACTGTTTATGAA
AAACTCAAACCCGTCCTTGATTGGCTTGAAGAGAAGTTTAAGGAAGGTGTAGAG
TTTCTTAGAGACGGTTGGGAAATTGTTAAATTTATCTCAACCTGTGCTTGTGAAAT
TGTCGGTGGACAAATTGTCACCTGTGCAAAGGAAATTAAGGAGAGTGTTCAGAC
ATTCTTTAAGCTTGTAAATAAATTTTTGGCTTTGTGTGCTGACTCTATCATTATTG
GTGGAGCTAAACTTAAAGCCTTGAATTTAGGTGAAACATTTGTCACGCACTCAAA
GGGATTGTACAGAAAGTGTGTTAAATCCAGAGAAGAAACTGGCCTACTCATGCC
TCTAAAAGCCCCAAAAGAAATTATCTTCTTAGAGGGAGAAACACTTCCCACAGA
AGTGTTAACAGAGGAAGTTGTCTTGAAAACTGGTGATTTACAACCATTAGAACA
ACCTACTAGTGAAGCTGTTGAAGCTCCATTGGTTGGTACACCAGTTTGTATTAAC
GGGCTTATGTTGCTCGAAATCAAAGACACAGAAAAGTACTGTGCCCTTGCACCTA
ATATGATGGTAACAAACAATACCTTCACACTCAAAGGCGGTGCACCAACAAAGG
TTACTTTTGGTGATGACACTGTGATAGAAGTGCAAGGTTACAAGAGTGTGAATAT
CACTTTTGAACTTGATGAAAGGATTGATAAAGTACTTAATGAGAAGTGCTCTGCC
TATACAGTTGAACTCGGTACAGAAGTAAATGAGTTCGCCTGTGTTGTGGCAGATG
CTGTCATAAAAACTTTGCAACCAGTATCTGAATTACTTACACCACTGGGCATTGA
TTTAGATGAGTGGAGTATGGCTACATACTACTTATTTGATGAGTCTGGTGAGTTT
AAATTGGCTTCACATATGTATTGTTCTTTCTACCCTCCAGATGAGGATGAAGAAG
AAGGTGATTGTGAAGAAGAAGAGTTTGAGCCATCAACTCAATATGAGTATGGTA
CTGAAGATGATTACCAAGGTAAACCTTTGGAATTTGGTGCCACTTCTGCTGCTCT
TCAACCTGAAGAAGAGCAAGAAGAAGATTGGTTAGATGATGATAGTCAACAAAC
TGTTGGTCAACAAGACGGCAGTGAGGACAATCAGACAACTACTATTCAAACAAT
TGTTGAGGTTCAACCTCAATTAGAGATGGAACTTACACCAGTTGTTCAGACTATT
GAAGTGAATAGTTTTAGTGGTTATTTAAAACTTACTGACAATGTATACATTAAAA
ATGCAGACATTGTGGAAGAAGCTAAAAAGGTAAAACCAACAGTGGTTGTTAATG
CAGCCAATGTTTACCTTAAACATGGAGGAGGTGTTGCAGGAGCCTTAAATAAGG
CTACTAACAATGCCATGCAAGTTGAATCTGATGATTACATAGCTACTAATGGACC
ACTTAAAGTGGGTGGTAGTTGTGTTTTAAGCGGACACAATCTTGCTAAACACTGT
CTTCATGTTGTCGGCCCAAATGTTAACAAAGGTGAAGACATTCAACTTCTTAAGA
GTGCTTATGAAAATTTTAATCAGCACGAAGTTCTACTTGCACCATTATTATCAGCT
GGTATTTTTGGTGCTGACCCTATACATTCTTTAAGAGTTTGTGTAGATACTGTTCG
CACAAATGTCTACTTAGCTGTCTTTGATAAAAATCTCTATGACAAACTTGTTTCAA
GCTTTTTGGAAATGAAGAGTGAAAAGCAAGTTGAACAAAAGATCGCTGAGATTC
CTAAAGAGGAAGTTAAGCCATTTATAACTGAAAGTAAACCTTCAGTTGAACAGA
GAAAACAAGATGATAAGAAAATCAAAGCTTGTGTTGAAGAAGTTACAACAACTC
TGGAAGAAACTAAGTTCCTCACAGAAAACTTGTTACTTTATATTGACATTAATGG
CAATCTTCATCCAGATTCTGCCACTCTTGTTAGTGACATTGACATCACTTTCTTAA
AGAAAGATGCTCCATATATAGTGGGTGATGTTGTTCAAGAGGGTGTTTTAACTGC
TGTGGTTATACCTACTAAAAAGGCTGGTGGCACTACTGAAATGCTAGCGAAAGC
TTTGAGAAAAGTGCCAACAGACAATTATATAACCACTTACCCGGGTCAGGGTTTA
AATGGTTACACTGTAGAGGAGGCAAAGACAGTGCTTAAAAAGTGTAAAAGTGCC
TTTTACATTCTACCATCTATTATCTCTAATGAGAAGCAAGAAATTCTTGGAACTGT
TTCTTGGAATTTGCGAGAAATGCTTGCACATGCAGAAGAAACACGCAAATTAAT
GCCTGTCTGTGTGGAAACTAAAGCCATAGTTTCAACTATACAGCGTAAATATAAG
GGTATTAAAATACAAGAGGGTGTGGTTGATTATGGTGCTAGATTTTACTTTTACA
CCAGTAAAACAACTGTAGCGTCACTTATCAACACACTTAACGATCTAAATGAAA
CTCTTGTTACAATGCCACTTGGCTATGTAACACATGGCTTAAATTTGGAAGAAGC
TGCTCGGTATATGAGATCTCTCAAAGTGCCAGCTACAGTTTCTGTTTCTTCACCTG
ATGCTGTTACAGCGTATAATGGTTATCTTACTTCTTCTTCTAAAACACCTGAAGAA
CATTTTATTGAAACCATCTCACTTGCTGGTTCCTATAAAGATTGGTCCTATTCTGG
ACAATCTACACAACTAGGTATAGAATTTCTTAAGAGAGGTGATAAAAGTGTATAT
TACACTAGTAATCCTACCACATTCCACCTAGATGGTGAAGTTATCACCTTTGACA
ATCTTAAGACACTTCTTTCTTTGAGAGAAGTGAGGACTATTAAGGTGTTTACAAC
AGTAGACAACATTAACCTCCACACGCAAGTTGTGGACATGTCAATGACATATGG
ACAACAGTTTGGTCCAACTTATTTGGATGGAGCTGATGTTACTAAAATAAAACCT
CATAATTCACATGAAGGTAAAACATTTTATGTTTTACCTAATGATGACACTCTAC
GTGTTGAGGCTTTTGAGTACTACCACACAACTGATCCTAGTTTTCTGGGTAGGTA
CATGTCAGCATTAAATCACACTAAAAAGTGGAAATACCCACAAGTTAATGGTTT
AACTTCTATTAAATGGGCAGATAACAACTGTTATCTTGCCACTGCATTGTTAACA
CTCCAACAAATAGAGTTGAAGTTTAATCCACCTGCTCTACAAGATGCTTATTACA
GAGCAAGGGCTGGTGAAGCTGCTAACTTTTGTGCACTTATCTTAGCCTACTGTAA
TAAGACAGTAGGTGAGTTAGGTGATGTTAGAGAAACAATGAGTTACTTGTTTCAA
CATGCCAATTTAGATTCTTGCAAAAGAGTCTTGAACGTGGTGTGTAAAACTTGTG
GACAACAGCAGACAACCCTTAAGGGTGTAGAAGCTGTTATGTACATGGGCACAC
TTTCTTATGAACAATTTAAGAAAGGTGTTCAGATACCTTGTACGTGTGGTAAACA
AGCTACAAAATATCTAGTACAACAGGAGTCACCTTTTGTTATGATGTCAGCACCA
CCTGCTCAGTATGAACTTAAGCATGGTACATTTACTTGTGCTAGTGAGTACACTG
GTAATTACCAGTGTGGTCACTATAAACATATAACTTCTAAAGAAACTTTGTATTG
CATAGACGGTGCTTTACTTACAAAGTCCTCAGAATACAAAGGTCCTATTACGGAT
GTTTTCTACAAAGAAAACAGTTACACAACAACCATAAAACCAGTTACTTATAAAT
TGGATGGTGTTGTTTGTACAGAAATTGACCCTAAGTTGGACAATTATTATAAGAA
AGACAATTCTTATTTCACAGAGCAACCAATTGATCTTGTACCAAACCAACCATAT
CCAAACGCAAGCTTCGATAATTTTAAGTTTGTATGTGATAATATCAAATTTGCTG
ATGATTTAAACCAGTTAACTGGTTATAAGAAACCTGCTTCAAGAGAGCTTAAAGT
TACATTTTTCCCTGACTTAAATGGTGATGTGGTGGCTATTGATTATAAACACTACA
CACCCTCTTTTAAGAAAGGAGCTAAATTGTTACATAAACCTATTGTTTGGCATGT
TAACAATGCAACTAATAAAGCCACGTATAAACCAAATACCTGGTGTATACGTTGT
CTTTGGAGCACAAAACCAGTTGAAACATCAAATTCGTTTGATGTACTGAAGTCAG
AGGACGCGCAGGGAATGGATAATCTTGCCTGCGAAGATCTAAAACCAGTCTCTG
AAGAAGTAGTGGAAAATCCTACCATACAGAAAGACGTTCTTGAGTGTAATGTGA
AAACTACCGAAGTTGTAGGAGACATTATACTTAAACCAGCAAATAATAGTTTAA
AAATTACAGAAGAGGTTGGCCACACAGATCTAATGGCTGCTTATGTAGACAATT
CTAGTCTTACTATTAAGAAACCTAATGAATTATCTAGAGTATTAGGTTTGAAAAC
CCTTGCTACTCATGGTTTAGCTGCTGTTAATAGTGTCCCTTGGGATACTATAGCTA
ATTATGCTAAGCCTTTTCTTAACAAAGTTGTTAGTACAACTACTAACATAGTTAC
ACGGTGTTTAAACCGTGTTTGTACTAATTATATGCCTTATTTCTTTACTTTATTGCT
ACAATTGTGTACTTTTACTAGAAGTACAAATTCTAGAATTAAAGCATCTATGCCG
ACTACTATAGCAAAGAATACTGTTAAGAGTGTCGGTAAATTTTGTCTAGAGGCTT
CATTTAATTATTTGAAGTCACCTAATTTTTCTAAACTGATAAATATTATAATTTGG
TTTTTACTATTAAGTGTTTGCCTAGGTTCGTTAATCTACTCGACCGCTGCTTTAGG
TGTTTTAATGTCGAATTTAGGCATGCCTTCGTACTGTACTGGTTACAGAGAAGGC
TATTTGAACTCGACTAATGTCACTATTGCAACCTACTGTACTGGTTCGATACCTTG
TTCGGTTTGTCTTTCGGGTTTAGATTCGTTAGACACCTATCCTTCGTTAGAAACTA
TACAAATTACCATTTCGTCGTTTAAATGGGATTTAACTGCTTTTGGCTTAGTTGCA
GAGTGGTTTTTGGCATATATTCTTTTCACTAGGTTTTTCTATGTACTTGGATTGGC
TGCAATCATGCAATTGTTTTTCTCGTATTTTGCAGTACATTTTATTTCGAATTCGT
GGCTTATGTGGTTAATAATTAATCTTGTACAAATGGCCCCGATTTCGGCTATGGTT
AGAATGTACATCTTCTTTGCATCGTTTTATTATGTATGGAAATCGTATGTGCATGT
TGTAGACGGTTGTAATTCGTCGACTTGTATGATGTGTTACAAACGTAATAGAGCA
ACAAGAGTCGAATGTACAACTATTGTTAATGGTGTTAGAAGGTCGTTTTATGTCT
ATGCTAATGGAGGTAAAGGCTTTTGCAAACTACACAATTGGAATTGTGTTAATTG
TGATACATTCTGTGCTGGTTCGACATTTATTTCGGATGAAGTTGCGAGAGACTTG
TCGCTACAGTTTAAAAGACCAATAAATCCTACTGACCAGTCGTCGTACATCGTTG
ATTCGGTTACAGTGAAGAATGGTTCGATCCATCTTTACTTTGATAAAGCTGGTCA
AAAGACTTATGAAAGACATTCGCTCTCGCATTTTGTTAACTTAGACAACCTGAGA
GCTAATAACACTAAAGGTTCGTTGCCTATTAATGTTATAGTTTTTGATGGTAAATC
GAAATGTGAAGAATCGTCGGCAAAATCGGCGTCGGTTTACTACTCGCAGCTTATG
TGTCAACCTATACTGTTACTAGATCAGGCATTAGTGTCGGATGTTGGTGATTCGG
CGGAAGTTGCAGTTAAAATGTTTGATGCTTACGTTAATACGTTTTCGTCGACTTTT
AACGTACCAATGGAAAAACTCAAAACACTAGTTGCAACTGCAGAAGCTGAACTT
GCAAAGAATGTGTCGTTAGACAATGTCTTATCGACTTTTATTTCGGCAGCTCGGC
AAGGGTTTGTTGATTCGGATGTAGAAACTAAAGATGTTGTTGAATGTCTTAAATT
GTCGCATCAATCGGACATAGAAGTTACTGGCGATTCGTGTAATAACTATATGCTC
ACCTATAACAAAGTTGAAAACATGACACCCCGTGACCTTGGTGCTTGTATTGACT
GTTCGGCGCGTCATATTAATGCGCAGGTAGCAAAATCGCACAACATTGCTTTGAT
ATGGAACGTTAAAGATTTCATGTCGTTGTCGGAACAACTACGAAAACAAATACG
TTCGGCTGCTAAAAAGAATAACTTACCTTTTAAGTTGACATGTGCAACTACTAGA
CAAGTTGTTAATGTTGTAACAACAAAGATAGCACTTAAGGGTGGTAAAATTGTTA
ATAATTGGTTGAAGCAGTTAATTAAA
SEQ ID NO: 47 - Clone pCC1-4K-SARS-COV-2-160-2. Only fragment 2 has been
deoptimized:
GGGTCCCACGTGCTAGCGCTAACATAGGTTGTAACCATACAGGTGTTG
TTGGAGAAGGTTCCGAAGGTCTTAATGACAACCTTCTTGAAATACTCCAAAAAG
AGAAAGTCAACATCAATATTGTTGGTGACTTTAAACTTAATGAAGAGATCGCCAT
TATTTTGGCATCTTTTTCTGCTTCCACAAGTGCTTTTGTGGAAACTGTGAAAGGTT
TGGATTATAAAGCATTCAAACAAATTGTTGAATCCTGTGGTAATTTTAAAGTTAC
AAAAGGAAAAGCTAAAAAAGGTGCCTGGAATATTGGTGAACAGAAATCAATACT
GAGTCCTCTTTATGCATTTGCATCAGAGGCTGCTCGTGTTGTACGATCAATTTTCT
CCCGCACTCTTGAAACTGCTCAAAATTCTGTGCGTGTTTTACAGAAGGCCGCTAT
AACAATACTAGATGGAATTTCACAGTATTCACTGAGACTCATTGATGCTATGATG
TTCACATCTGATTTGGCTACTAACAATCTAGTTGTAATGGCCTACATTACAGGTG
GTGTTGTTCAGTTGACTTCGCAGTGGCTAACTAACATCTTTGGCACTGTTTATGAA
AAACTCAAACCCGTCCTTGATTGGCTTGAAGAGAAGTTTAAGGAAGGTGTAGAG
TTTCTTAGAGACGGTTGGGAAATTGTTAAATTTATCTCAACCTGTGCTTGTGAAAT
TGTCGGTGGACAAATTGTCACCTGTGCAAAGGAAATTAAGGAGAGTGTTCAGAC
ATTCTTTAAGCTTGTAAATAAATTTTTGGCTTTGTGTGCTGACTCTATCATTATTG
GTGGAGCTAAACTTAAAGCCTTGAATTTAGGTGAAACATTTGTCACGCACTCAAA
GGGATTGTACAGAAAGTGTGTTAAATCCAGAGAAGAAACTGGCCTACTCATGCC
TCTAAAAGCCCCAAAAGAAATTATCTTCTTAGAGGGAGAAACACTTCCCACAGA
AGTGTTAACAGAGGAAGTTGTCTTGAAAACTGGTGATTTACAACCATTAGAACA
ACCTACTAGTGAAGCTGTTGAAGCTCCATTGGTTGGTACACCAGTTTGTATTAAC
GGGCTTATGTTGCTCGAAATCAAAGACACAGAAAAGTACTGTGCCCTTGCACCTA
ATATGATGGTAACAAACAATACCTTCACACTCAAAGGCGGTGCACCAACAAAGG
TTACTTTTGGTGATGACACTGTGATAGAAGTGCAAGGTTACAAGAGTGTGAATAT
CACTTTTGAACTTGATGAAAGGATTGATAAAGTACTTAATGAGAAGTGCTCTGCC
TATACAGTTGAACTCGGTACAGAAGTAAATGAGTTCGCCTGTGTTGTGGCAGATG
CTGTCATAAAAACTTTGCAACCAGTATCTGAATTACTTACACCACTGGGCATTGA
TTTAGATGAGTGGAGTATGGCTACATACTACTTATTTGATGAGTCTGGTGAGTTT
AAATTGGCTTCACATATGTATTGTTCTTTCTACCCTCCAGATGAGGATGAAGAAG
AAGGTGATTGTGAAGAAGAAGAGTTTGAGCCATCAACTCAATATGAGTATGGTA
CTGAAGATGATTACCAAGGTAAACCTTTGGAATTTGGTGCCACTTCTGCTGCTCT
TCAACCTGAAGAAGAGCAAGAAGAAGATTGGTTAGATGATGATAGTCAACAAAC
TGTTGGTCAACAAGACGGCAGTGAGGACAATCAGACAACTACTATTCAAACAAT
TGTTGAGGTTCAACCTCAATTAGAGATGGAACTTACACCAGTTGTTCAGACTATT
GAAGTGAATAGTTTTAGTGGTTATTTAAAACTTACTGACAATGTATACATTAAAA
ATGCAGACATTGTGGAAGAAGCTAAAAAGGTAAAACCAACAGTGGTTGTTAATG
CAGCCAATGTTTACCTTAAACATGGAGGAGGTGTTGCAGGAGCCTTAAATAAGG
CTACTAACAATGCCATGCAAGTTGAATCTGATGATTACATAGCTACTAATGGACC
ACTTAAAGTGGGTGGTAGTTGTGTTTTAAGCGGACACAATCTTGCTAAACACTGT
CTTCATGTTGTCGGCCCAAATGTTAACAAAGGTGAAGACATTCAACTTCTTAAGA
GTGCTTATGAAAATTTTAATCAGCACGAAGTTCTACTTGCACCATTATTATCAGCT
GGTATTTTTGGTGCTGACCCTATACATTCTTTAAGAGTTTGTGTAGATACTGTTCG
CACAAATGTCTACTTAGCTGTCTTTGATAAAAATCTCTATGACAAACTTGTTTCAA
GCTTTTTGGAAATGAAGAGTGAAAAGCAAGTTGAACAAAAGATCGCTGAGATTC
CTAAAGAGGAAGTTAAGCCATTTATAACTGAAAGTAAACCTTCAGTTGAACAGA
GAAAACAAGATGATAAGAAAATCAAAGCTTGTGTTGAAGAAGTTACAACAACTC
TGGAAGAAACTAAGTTCCTCACAGAAAACTTGTTACTTTATATTGACATTAATGG
CAATCTTCATCCAGATTCTGCCACTCTTGTTAGTGACATTGACATCACTTTCTTAA
AGAAAGATGCTCCATATATAGTGGGTGATGTTGTTCAAGAGGGTGTTTTAACTGC
TGTGGTTATACCTACTAAAAAGGCTGGTGGCACTACTGAAATGCTAGCGAAAGC
TTTGAGAAAAGTGCCAACAGACAATTATATAACCACTTACCCGGGTCAGGGTTTA
AATGGTTACACTGTAGAGGAGGCAAAGACAGTGCTTAAAAAGTGTAAATCGGCC
TTTTACATTCTACCATCGATTATCTCGAATGAGAAGCAAGAAATTCTTGGAACTG
TTTCGTGGAATTTGCGAGAAATGCTTGCACATGCAGAAGAAACACGCAAATTAA
TGCCTGTCTGTGTGGAAACTAAAGCCATAGTTTCGACTATACAGCGTAAATATAA
GGGTATTAAAATACAAGAGGGTGTGGTTGATTATGGTGCTAGATTTTACTTTTAC
ACCTCGAAAACAACTGTAGCGTCGCTTATCAACACACTTAACGATCTAAATGAA
ACTCTTGTTACAATGCCACTTGGCTATGTAACACATGGCTTAAATTTGGAAGAAG
CTGCTCGGTATATGAGATCGCTCAAAGTGCCAGCTACAGTTTCGGTTTCGTCGCC
TGATGCTGTTACAGCGTATAATGGTTATCTTACTTCGTCGTCGAAAACACCTGAA
GAACATTTTATTGAAACCATCTCGCTTGCTGGTTCGTATAAAGATTGGTCGTATTC
GGGACAATCGACACAACTAGGTATAGAATTTCTTAAGAGAGGTGATAAATCGGT
ATATTACACTTCGAATCCTACCACATTCCACCTAGATGGTGAAGTTATCACCTTT
GACAATCTTAAGACACTTCTTTCGTTGAGAGAAGTGAGGACTATTAAGGTGTTTA
CAACAGTAGACAACATTAACCTCCACACGCAAGTTGTGGACATGTCGATGACAT
ATGGACAACAGTTTGGTCCAACTTATTTGGATGGAGCTGATGTTACTAAAATAAA
ACCTCATAATTCGCATGAAGGTAAAACATTTTATGTTTTACCTAATGATGACACT
CTACGTGTTGAGGCTTTTGAGTACTACCACACAACTGATCCTTCGTTTCTGGGTA
GGTACATGTCGGCATTAAATCACACTAAAAAGTGGAAATACCCACAAGTTAATG
GTTTAACTTCGATTAAATGGGCAGATAACAACTGTTATCTTGCCACTGCATTGTT
AACACTCCAACAAATAGAGTTGAAGTTTAATCCACCTGCTCTACAAGATGCTTAT
TACAGAGCAAGGGCTGGTGAAGCTGCTAACTTTTGTGCACTTATCTTAGCCTACT
GTAATAAGACAGTAGGTGAGTTAGGTGATGTTAGAGAAACAATGTCGTACTTGTT
TCAACATGCCAATTTAGATTCGTGCAAAAGAGTCTTGAACGTGGTGTGTAAAACT
TGTGGACAACAGCAGACAACCCTTAAGGGTGTAGAAGCTGTTATGTACATGGGC
ACACTTTCGTATGAACAATTTAAGAAAGGTGTTCAGATACCTTGTACGTGTGGTA
AACAAGCTACAAAATATCTAGTACAACAGGAGTCGCCTTTTGTTATGATGTCGGC
ACCACCTGCTCAGTATGAACTTAAGCATGGTACATTTACTTGTGCTTCGGAGTAC
ACTGGTAATTACCAGTGTGGTCACTATAAACATATAACTTCGAAAGAAACTTTGT
ATTGCATAGACGGTGCTTTACTTACAAAGTCGTCGGAATACAAAGGTCCTATTAC
GGATGTTTTCTACAAAGAAAACTCGTACACAACAACCATAAAACCAGTTACTTAT
AAATTGGATGGTGTTGTTTGTACAGAAATTGACCCTAAGTTGGACAATTATTATA
AGAAAGACAATTCGTATTTCACAGAGCAACCAATTGATCTTGTACCAAACCAAC
CATATCCAAACGCATCGTTCGATAATTTTAAGTTTGTATGTGATAATATCAAATTT
GCTGATGATTTAAACCAGTTAACTGGTTATAAGAAACCTGCTTCGAGAGAGCTTA
AAGTTACATTTTTCCCTGACTTAAATGGTGATGTGGTGGCTATTGATTATAAACA
CTACACACCCTCGTTTAAGAAAGGAGCTAAATTGTTACATAAACCTATTGTTTGG
CATGTTAACAATGCAACTAATAAAGCCACGTATAAACCAAATACCTGGTGTATA
CGTTGTCTTTGGTCGACAAAACCAGTTGAAACATCGAATTCGTTTGATGTACTGA
AGTCGGAGGACGCGCAGGGAATGGATAATCTTGCCTGCGAAGATCTAAAACCAG
TCTCGGAAGAAGTAGTGGAAAATCCTACCATACAGAAAGACGTTCTTGAGTGTA
ATGTGAAAACTACCGAAGTTGTAGGAGACATTATACTTAAACCAGCAAATAATT
CGTTAAAAATTACAGAAGAGGTTGGCCACACAGATCTAATGGCTGCTTATGTAG
ACAATTCGTCGCTTACTATTAAGAAACCTAATGAATTATCGAGAGTATTAGGTTT
GAAAACCCTTGCTACTCATGGTTTAGCTGCTGTTAATTCGGTCCCTTGGGATACT
ATAGCTAATTATGCTAAGCCTTTTCTTAACAAAGTTGTTTCGACAACTACTAACAT
AGTTACACGGTGTTTAAACCGTGTTTGTACTAATTATATGCCTTATTTCTTTACTT
TATTGCTACAATTGTGTACTTTTACTAGATCGACAAATTCGAGAATTAAAGCATC
GATGCCGACTACTATAGCAAAGAATACTGTTAAGTCGGTCGGTAAATTTTGTCTA
GAGGCTTCGTTTAATTATTTGAAGTCGCCTAATTTTTCGAAACTGATAAATATTAT
AATTTGGTTTTTACTATTATCGGTTTGCCTAGGTTCTTTAATCTACTCAACCGCTG
CTTTAGGTGTTTTAATGTCTAATTTAGGCATGCCTTCTTACTGTACTGGTTACAGA
GAAGGCTATTTGAACTCTACTAATGTCACTATTGCAACCTACTGTACTGGTTCTAT
ACCTTGTAGTGTTTGTCTTAGTGGTTTAGATTCTTTAGACACCTATCCTTCTTTAG
AAACTATACAAATTACCATTTCATCTTTTAAATGGGATTTAACTGCTTTTGGCTTA
GTTGCAGAGTGGTTTTTGGCATATATTCTTTTCACTAGGTTTTTCTATGTACTTGG
ATTGGCTGCAATCATGCAATTGTTTTTCAGCTATTTTGCAGTACATTTTATTAGTA
ATTCTTGGCTTATGTGGTTAATAATTAATCTTGTACAAATGGCCCCGATTTCAGCT
ATGGTTAGAATGTACATCTTCTTTGCATCATTTTATTATGTATGGAAAAGTTATGT
GCATGTTGTAGACGGTTGTAATTCATCAACTTGTATGATGTGTTACAAACGTAAT
AGAGCAACAAGAGTCGAATGTACAACTATTGTTAATGGTGTTAGAAGGTCCTTTT
ATGTCTATGCTAATGGAGGTAAAGGCTTTTGCAAACTACACAATTGGAATTGTGT
TAATTGTGATACATTCTGTGCTGGTAGTACATTTATTAGTGATGAAGTTGCGAGA
GACTTGTCACTACAGTTTAAAAGACCAATAAATCCTACTGACCAGTCTTCTTACA
TCGTTGATAGTGTTACAGTGAAGAATGGTTCCATCCATCTTTACTTTGATAAAGCT
GGTCAAAAGACTTATGAAAGACATTCTCTCTCTCATTTTGTTAACTTAGACAACC
TGAGAGCTAATAACACTAAAGGTTCATTGCCTATTAATGTTATAGTTTTTGATGG
TAAATCAAAATGTGAAGAATCATCTGCAAAATCAGCGTCTGTTTACTACAGTCAG
CTTATGTGTCAACCTATACTGTTACTAGATCAGGCATTAGTGTCTGATGTTGGTGA
TAGTGCGGAAGTTGCAGTTAAAATGTTTGATGCTTACGTTAATACGTTTTCATCA
ACTTTTAACGTACCAATGGAAAAACTCAAAACACTAGTTGCAACTGCAGAAGCT
GAACTTGCAAAGAATGTGTCCTTAGACAATGTCTTATCTACTTTTATTTCAGCAGC
TCGGCAAGGGTTTGTTGATTCAGATGTAGAAACTAAAGATGTTGTTGAATGTCTT
AAATTGTCACATCAATCTGACATAGAAGTTACTGGCGATAGTTGTAATAACTATA
TGCTCACCTATAACAAAGTTGAAAACATGACACCCCGTGACCTTGGTGCTTGTAT
TGACTGTAGTGCGCGTCATATTAATGCGCAGGTAGCAAAAAGTCACAACATTGCT
TTGATATGGAACGTTAAAGATTTCATGTCATTGTCTGAACAACTACGAAAACAAA
TACGTAGTGCTGCTAAAAAGAATAACTTACCTTTTAAGTTGACATGTGCAACTAC
TAGACAAGTTGTTAATGTTGTAACAACAAAGATAGCACTTAAGGGTGGTAAAAT
TGTTAATAATTGGTTGAAGCAGTTAATTAAA
SEQ ID NO: 48 - Clone pCC1-4K-SARS-COV-2-160-3. Only fragment 1 has been
deoptimized:
GGGTCCCACGTGCTTCGGCTAACATAGGTTGTAACCATACAGGTGTTG
TTGGAGAAGGTTCGGAAGGTCTTAATGACAACCTTCTTGAAATACTCCAAAAAG
AGAAAGTCAACATCAATATTGTTGGTGACTTTAAACTTAATGAAGAGATCGCCAT
TATTTTGGCATCGTTTTCGGCTTCGACATCGGCTTTTGTGGAAACTGTGAAAGGTT
TGGATTATAAAGCATTCAAACAAATTGTTGAATCGTGTGGTAATTTTAAAGTTAC
AAAAGGAAAAGCTAAAAAAGGTGCCTGGAATATTGGTGAACAGAAATCGATACT
GTCGCCTCTTTATGCATTTGCATCGGAGGCTGCTCGTGTTGTACGATCGATTTTCT
CGCGCACTCTTGAAACTGCTCAAAATTCGGTGCGTGTTTTACAGAAGGCCGCTAT
AACAATACTAGATGGAATTTCGCAGTATTCGCTGAGACTCATTGATGCTATGATG
TTCACATCGGATTTGGCTACTAACAATCTAGTTGTAATGGCCTACATTACAGGTG
GTGTTGTTCAGTTGACTTCGCAGTGGCTAACTAACATCTTTGGCACTGTTTATGAA
AAACTCAAACCCGTCCTTGATTGGCTTGAAGAGAAGTTTAAGGAAGGTGTAGAG
TTTCTTAGAGACGGTTGGGAAATTGTTAAATTTATCTCGACCTGTGCTTGTGAAAT
TGTCGGTGGACAAATTGTCACCTGTGCAAAGGAAATTAAGGAGTCGGTTCAGAC
ATTCTTTAAGCTTGTAAATAAATTTTTGGCTTTGTGTGCTGACTCGATCATTATTG
GTGGAGCTAAACTTAAAGCCTTGAATTTAGGTGAAACATTTGTCACGCACTCGAA
GGGATTGTACAGAAAGTGTGTTAAATCGAGAGAAGAAACTGGCCTACTCATGCC
TCTAAAAGCCCCAAAAGAAATTATCTTCTTAGAGGGAGAAACACTTCCCACAGA
AGTGTTAACAGAGGAAGTTGTCTTGAAAACTGGTGATTTACAACCATTAGAACA
ACCTACTTCGGAAGCTGTTGAAGCTCCATTGGTTGGTACACCAGTTTGTATTAAC
GGGCTTATGTTGCTCGAAATCAAAGACACAGAAAAGTACTGTGCCCTTGCACCTA
ATATGATGGTAACAAACAATACCTTCACACTCAAAGGCGGTGCACCAACAAAGG
TTACTTTTGGTGATGACACTGTGATAGAAGTGCAAGGTTACAAGTCGGTGAATAT
CACTTTTGAACTTGATGAAAGGATTGATAAAGTACTTAATGAGAAGTGCTCGGCC
TATACAGTTGAACTCGGTACAGAAGTAAATGAGTTCGCCTGTGTTGTGGCAGATG
CTGTCATAAAAACTTTGCAACCAGTATCGGAATTACTTACACCACTGGGCATTGA
TTTAGATGAGTGGTCGATGGCTACATACTACTTATTTGATGAGTCGGGTGAGTTT
AAATTGGCTTCGCATATGTATTGTTCGTTCTACCCTCCAGATGAGGATGAAGAAG
AAGGTGATTGTGAAGAAGAAGAGTTTGAGCCATCGACTCAATATGAGTATGGTA
CTGAAGATGATTACCAAGGTAAACCTTTGGAATTTGGTGCCACTTCGGCTGCTCT
TCAACCTGAAGAAGAGCAAGAAGAAGATTGGTTAGATGATGATTCGCAACAAAC
TGTTGGTCAACAAGACGGCTCGGAGGACAATCAGACAACTACTATTCAAACAAT
TGTTGAGGTTCAACCTCAATTAGAGATGGAACTTACACCAGTTGTTCAGACTATT
GAAGTGAATTCGTTTTCGGGTTATTTAAAACTTACTGACAATGTATACATTAAAA
ATGCAGACATTGTGGAAGAAGCTAAAAAGGTAAAACCAACAGTGGTTGTTAATG
CAGCCAATGTTTACCTTAAACATGGAGGAGGTGTTGCAGGAGCCTTAAATAAGG
CTACTAACAATGCCATGCAAGTTGAATCGGATGATTACATAGCTACTAATGGACC
ACTTAAAGTGGGTGGTTCGTGTGTTTTATCGGGACACAATCTTGCTAAACACTGT
CTTCATGTTGTCGGCCCAAATGTTAACAAAGGTGAAGACATTCAACTTCTTAAGT
CGGCTTATGAAAATTTTAATCAGCACGAAGTTCTACTTGCACCATTATTATCGGC
TGGTATTTTTGGTGCTGACCCTATACATTCGTTAAGAGTTTGTGTAGATACTGTTC
GCACAAATGTCTACTTAGCTGTCTTTGATAAAAATCTCTATGACAAACTTGTTTCG
TCGTTTTTGGAAATGAAGTCGGAAAAGCAAGTTGAACAAAAGATCGCTGAGATT
CCTAAAGAGGAAGTTAAGCCATTTATAACTGAATCGAAACCTTCGGTTGAACAG
AGAAAACAAGATGATAAGAAAATCAAAGCTTGTGTTGAAGAAGTTACAACAACT
CTGGAAGAAACTAAGTTCCTCACAGAAAACTTGTTACTTTATATTGACATTAATG
GCAATCTTCATCCAGATTCGGCCACTCTTGTTTCGGACATTGACATCACTTTCTTA
AAGAAAGATGCTCCATATATAGTGGGTGATGTTGTTCAAGAGGGTGTTTTAACTG
CTGTGGTTATACCTACTAAAAAGGCTGGTGGCACTACTGAAATGCTAGCGAAAG
CTTTGAGAAAAGTGCCAACAGACAATTATATAACCACTTACCCGGGTCAGGGTTT
AAATGGTTACACTGTAGAGGAGGCAAAGACAGTGCTTAAAAAGTGTAAAAGTGC
CTTTTACATTCTACCATCTATTATCTCTAATGAGAAGCAAGAAATTCTTGGAACTG
TTTCTTGGAATTTGCGAGAAATGCTTGCACATGCAGAAGAAACACGCAAATTAAT
GCCTGTCTGTGTGGAAACTAAAGCCATAGTTTCAACTATACAGCGTAAATATAAG
GGTATTAAAATACAAGAGGGTGTGGTTGATTATGGTGCTAGATTTTACTTTTACA
CCAGTAAAACAACTGTAGCGTCACTTATCAACACACTTAACGATCTAAATGAAA
CTCTTGTTACAATGCCACTTGGCTATGTAACACATGGCTTAAATTTGGAAGAAGC
TGCTCGGTATATGAGATCTCTCAAAGTGCCAGCTACAGTTTCTGTTTCTTCACCTG
ATGCTGTTACAGCGTATAATGGTTATCTTACTTCTTCTTCTAAAACACCTGAAGAA
CATTTTATTGAAACCATCTCACTTGCTGGTTCCTATAAAGATTGGTCCTATTCTGG
ACAATCTACACAACTAGGTATAGAATTTCTTAAGAGAGGTGATAAAAGTGTATAT
TACACTAGTAATCCTACCACATTCCACCTAGATGGTGAAGTTATCACCTTTGACA
ATCTTAAGACACTTCTTTCTTTGAGAGAAGTGAGGACTATTAAGGTGTTTACAAC
AGTAGACAACATTAACCTCCACACGCAAGTTGTGGACATGTCAATGACATATGG
ACAACAGTTTGGTCCAACTTATTTGGATGGAGCTGATGTTACTAAAATAAAACCT
CATAATTCACATGAAGGTAAAACATTTTATGTTTTACCTAATGATGACACTCTAC
GTGTTGAGGCTTTTGAGTACTACCACACAACTGATCCTAGTTTTCTGGGTAGGTA
CATGTCAGCATTAAATCACACTAAAAAGTGGAAATACCCACAAGTTAATGGTTT
AACTTCTATTAAATGGGCAGATAACAACTGTTATCTTGCCACTGCATTGTTAACA
CTCCAACAAATAGAGTTGAAGTTTAATCCACCTGCTCTACAAGATGCTTATTACA
GAGCAAGGGCTGGTGAAGCTGCTAACTTTTGTGCACTTATCTTAGCCTACTGTAA
TAAGACAGTAGGTGAGTTAGGTGATGTTAGAGAAACAATGAGTTACTTGTTTCAA
CATGCCAATTTAGATTCTTGCAAAAGAGTCTTGAACGTGGTGTGTAAAACTTGTG
GACAACAGCAGACAACCCTTAAGGGTGTAGAAGCTGTTATGTACATGGGCACAC
TTTCTTATGAACAATTTAAGAAAGGTGTTCAGATACCTTGTACGTGTGGTAAACA
AGCTACAAAATATCTAGTACAACAGGAGTCACCTTTTGTTATGATGTCAGCACCA
CCTGCTCAGTATGAACTTAAGCATGGTACATTTACTTGTGCTAGTGAGTACACTG
GTAATTACCAGTGTGGTCACTATAAACATATAACTTCTAAAGAAACTTTGTATTG
CATAGACGGTGCTTTACTTACAAAGTCCTCAGAATACAAAGGTCCTATTACGGAT
GTTTTCTACAAAGAAAACAGTTACACAACAACCATAAAACCAGTTACTTATAAAT
TGGATGGTGTTGTTTGTACAGAAATTGACCCTAAGTTGGACAATTATTATAAGAA
AGACAATTCTTATTTCACAGAGCAACCAATTGATCTTGTACCAAACCAACCATAT
CCAAACGCAAGCTTCGATAATTTTAAGTTTGTATGTGATAATATCAAATTTGCTG
ATGATTTAAACCAGTTAACTGGTTATAAGAAACCTGCTTCAAGAGAGCTTAAAGT
TACATTTTTCCCTGACTTAAATGGTGATGTGGTGGCTATTGATTATAAACACTACA
CACCCTCTTTTAAGAAAGGAGCTAAATTGTTACATAAACCTATTGTTTGGCATGT
TAACAATGCAACTAATAAAGCCACGTATAAACCAAATACCTGGTGTATACGTTGT
CTTTGGAGCACAAAACCAGTTGAAACATCAAATTCGTTTGATGTACTGAAGTCAG
AGGACGCGCAGGGAATGGATAATCTTGCCTGCGAAGATCTAAAACCAGTCTCTG
AAGAAGTAGTGGAAAATCCTACCATACAGAAAGACGTTCTTGAGTGTAATGTGA
AAACTACCGAAGTTGTAGGAGACATTATACTTAAACCAGCAAATAATAGTTTAA
AAATTACAGAAGAGGTTGGCCACACAGATCTAATGGCTGCTTATGTAGACAATT
CTAGTCTTACTATTAAGAAACCTAATGAATTATCTAGAGTATTAGGTTTGAAAAC
CCTTGCTACTCATGGTTTAGCTGCTGTTAATAGTGTCCCTTGGGATACTATAGCTA
ATTATGCTAAGCCTTTTCTTAACAAAGTTGTTAGTACAACTACTAACATAGTTAC
ACGGTGTTTAAACCGTGTTTGTACTAATTATATGCCTTATTTCTTTACTTTATTGCT
ACAATTGTGTACTTTTACTAGAAGTACAAATTCTAGAATTAAAGCATCTATGCCG
ACTACTATAGCAAAGAATACTGTTAAGAGTGTCGGTAAATTTTGTCTAGAGGCTT
CATTTAATTATTTGAAGTCACCTAATTTTTCTAAACTGATAAATATTATAATTTGG
TTTTTACTATTAAGTGTTTGCCTAGGTTCTTTAATCTACTCAACCGCTGCTTTAGG
TGTTTTAATGTCTAATTTAGGCATGCCTTCTTACTGTACTGGTTACAGAGAAGGCT
ATTTGAACTCTACTAATGTCACTATTGCAACCTACTGTACTGGTTCTATACCTTGT
AGTGTTTGTCTTAGTGGTTTAGATTCTTTAGACACCTATCCTTCTTTAGAAACTAT
ACAAATTACCATTTCATCTTTTAAATGGGATTTAACTGCTTTTGGCTTAGTTGCAG
AGTGGTTTTTGGCATATATTCTTTTCACTAGGTTTTTCTATGTACTTGGATTGGCT
GCAATCATGCAATTGTTTTTCAGCTATTTTGCAGTACATTTTATTAGTAATTCTTG
GCTTATGTGGTTAATAATTAATCTTGTACAAATGGCCCCGATTTCAGCTATGGTTA
GAATGTACATCTTCTTTGCATCATTTTATTATGTATGGAAAAGTTATGTGCATGTT
GTAGACGGTTGTAATTCATCAACTTGTATGATGTGTTACAAACGTAATAGAGCAA
CAAGAGTCGAATGTACAACTATTGTTAATGGTGTTAGAAGGTCCTTTTATGTCTA
TGCTAATGGAGGTAAAGGCTTTTGCAAACTACACAATTGGAATTGTGTTAATTGT
GATACATTCTGTGCTGGTAGTACATTTATTAGTGATGAAGTTGCGAGAGACTTGT
CACTACAGTTTAAAAGACCAATAAATCCTACTGACCAGTCTTCTTACATCGTTGA
TAGTGTTACAGTGAAGAATGGTTCCATCCATCTTTACTTTGATAAAGCTGGTCAA
AAGACTTATGAAAGACATTCTCTCTCTCATTTTGTTAACTTAGACAACCTGAGAG
CTAATAACACTAAAGGTTCATTGCCTATTAATGTTATAGTTTTTGATGGTAAATCA
AAATGTGAAGAATCATCTGCAAAATCAGCGTCTGTTTACTACAGTCAGCTTATGT
GTCAACCTATACTGTTACTAGATCAGGCATTAGTGTCTGATGTTGGTGATAGTGC
GGAAGTTGCAGTTAAAATGTTTGATGCTTACGTTAATACGTTTTCATCAACTTTTA
ACGTACCAATGGAAAAACTCAAAACACTAGTTGCAACTGCAGAAGCTGAACTTG
CAAAGAATGTGTCCTTAGACAATGTCTTATCTACTTTTATTTCAGCAGCTCGGCA
AGGGTTTGTTGATTCAGATGTAGAAACTAAAGATGTTGTTGAATGTCTTAAATTG
TCACATCAATCTGACATAGAAGTTACTGGCGATAGTTGTAATAACTATATGCTCA
CCTATAACAAAGTTGAAAACATGACACCCCGTGACCTTGGTGCTTGTATTGACTG
TAGTGCGCGTCATATTAATGCGCAGGTAGCAAAAAGTCACAACATTGCTTTGATA
TGGAACGTTAAAGATTTCATGTCATTGTCTGAACAACTACGAAAACAAATACGTA
GTGCTGCTAAAAAGAATAACTTACCTTTTAAGTTGACATGTGCAACTACTAGACA
AGTTGTTAATGTTGTAACAACAAAGATAGCACTTAAGGGTGGTAAAATTGTTAAT
AATTGGTTGAAGCAGTTAATTAAA
SEQ ID NO: 49 - Clone pCC1-4K-SARS-COV-2-160-4. Only fragments 1 and 2
have been deoptimized:
GGGTCCCACGTGCTTCGGCTAACATAGGTTGTAACCATACAGGTGTTG
TTGGAGAAGGTTCGGAAGGTCTTAATGACAACCTTCTTGAAATACTCCAAAAAG
AGAAAGTCAACATCAATATTGTTGGTGACTTTAAACTTAATGAAGAGATCGCCAT
TATTTTGGCATCGTTTTCGGCTTCGACATCGGCTTTTGTGGAAACTGTGAAAGGTT
TGGATTATAAAGCATTCAAACAAATTGTTGAATCGTGTGGTAATTTTAAAGTTAC
AAAAGGAAAAGCTAAAAAAGGTGCCTGGAATATTGGTGAACAGAAATCGATACT
GTCGCCTCTTTATGCATTTGCATCGGAGGCTGCTCGTGTTGTACGATCGATTTTCT
CGCGCACTCTTGAAACTGCTCAAAATTCGGTGCGTGTTTTACAGAAGGCCGCTAT
AACAATACTAGATGGAATTTCGCAGTATTCGCTGAGACTCATTGATGCTATGATG
TTCACATCGGATTTGGCTACTAACAATCTAGTTGTAATGGCCTACATTACAGGTG
GTGTTGTTCAGTTGACTTCGCAGTGGCTAACTAACATCTTTGGCACTGTTTATGAA
AAACTCAAACCCGTCCTTGATTGGCTTGAAGAGAAGTTTAAGGAAGGTGTAGAG
TTTCTTAGAGACGGTTGGGAAATTGTTAAATTTATCTCGACCTGTGCTTGTGAAAT
TGTCGGTGGACAAATTGTCACCTGTGCAAAGGAAATTAAGGAGTCGGTTCAGAC
ATTCTTTAAGCTTGTAAATAAATTTTTGGCTTTGTGTGCTGACTCGATCATTATTG
GTGGAGCTAAACTTAAAGCCTTGAATTTAGGTGAAACATTTGTCACGCACTCGAA
GGGATTGTACAGAAAGTGTGTTAAATCGAGAGAAGAAACTGGCCTACTCATGCC
TCTAAAAGCCCCAAAAGAAATTATCTTCTTAGAGGGAGAAACACTTCCCACAGA
AGTGTTAACAGAGGAAGTTGTCTTGAAAACTGGTGATTTACAACCATTAGAACA
ACCTACTTCGGAAGCTGTTGAAGCTCCATTGGTTGGTACACCAGTTTGTATTAAC
GGGCTTATGTTGCTCGAAATCAAAGACACAGAAAAGTACTGTGCCCTTGCACCTA
ATATGATGGTAACAAACAATACCTTCACACTCAAAGGCGGTGCACCAACAAAGG
TTACTTTTGGTGATGACACTGTGATAGAAGTGCAAGGTTACAAGTCGGTGAATAT
CACTTTTGAACTTGATGAAAGGATTGATAAAGTACTTAATGAGAAGTGCTCGGCC
TATACAGTTGAACTCGGTACAGAAGTAAATGAGTTCGCCTGTGTTGTGGCAGATG
CTGTCATAAAAACTTTGCAACCAGTATCGGAATTACTTACACCACTGGGCATTGA
TTTAGATGAGTGGTCGATGGCTACATACTACTTATTTGATGAGTCGGGTGAGTTT
AAATTGGCTTCGCATATGTATTGTTCGTTCTACCCTCCAGATGAGGATGAAGAAG
AAGGTGATTGTGAAGAAGAAGAGTTTGAGCCATCGACTCAATATGAGTATGGTA
CTGAAGATGATTACCAAGGTAAACCTTTGGAATTTGGTGCCACTTCGGCTGCTCT
TCAACCTGAAGAAGAGCAAGAAGAAGATTGGTTAGATGATGATTCGCAACAAAC
TGTTGGTCAACAAGACGGCTCGGAGGACAATCAGACAACTACTATTCAAACAAT
TGTTGAGGTTCAACCTCAATTAGAGATGGAACTTACACCAGTTGTTCAGACTATT
GAAGTGAATTCGTTTTCGGGTTATTTAAAACTTACTGACAATGTATACATTAAAA
ATGCAGACATTGTGGAAGAAGCTAAAAAGGTAAAACCAACAGTGGTTGTTAATG
CAGCCAATGTTTACCTTAAACATGGAGGAGGTGTTGCAGGAGCCTTAAATAAGG
CTACTAACAATGCCATGCAAGTTGAATCGGATGATTACATAGCTACTAATGGACC
ACTTAAAGTGGGTGGTTCGTGTGTTTTATCGGGACACAATCTTGCTAAACACTGT
CTTCATGTTGTCGGCCCAAATGTTAACAAAGGTGAAGACATTCAACTTCTTAAGT
CGGCTTATGAAAATTTTAATCAGCACGAAGTTCTACTTGCACCATTATTATCGGC
TGGTATTTTTGGTGCTGACCCTATACATTCGTTAAGAGTTTGTGTAGATACTGTTC
GCACAAATGTCTACTTAGCTGTCTTTGATAAAAATCTCTATGACAAACTTGTTTCG
TCGTTTTTGGAAATGAAGTCGGAAAAGCAAGTTGAACAAAAGATCGCTGAGATT
CCTAAAGAGGAAGTTAAGCCATTTATAACTGAATCGAAACCTTCGGTTGAACAG
AGAAAACAAGATGATAAGAAAATCAAAGCTTGTGTTGAAGAAGTTACAACAACT
CTGGAAGAAACTAAGTTCCTCACAGAAAACTTGTTACTTTATATTGACATTAATG
GCAATCTTCATCCAGATTCGGCCACTCTTGTTTCGGACATTGACATCACTTTCTTA
AAGAAAGATGCTCCATATATAGTGGGTGATGTTGTTCAAGAGGGTGTTTTAACTG
CTGTGGTTATACCTACTAAAAAGGCTGGTGGCACTACTGAAATGCTAGCGAAAG
CTTTGAGAAAAGTGCCAACAGACAATTATATAACCACTTACCCGGGTCAGGGTTT
AAATGGTTACACTGTAGAGGAGGCAAAGACAGTGCTTAAAAAGTGTAAATCGGC
CTTTTACATTCTACCATCGATTATCTCGAATGAGAAGCAAGAAATTCTTGGAACT
GTTTCGTGGAATTTGCGAGAAATGCTTGCACATGCAGAAGAAACACGCAAATTA
ATGCCTGTCTGTGTGGAAACTAAAGCCATAGTTTCGACTATACAGCGTAAATATA
AGGGTATTAAAATACAAGAGGGTGTGGTTGATTATGGTGCTAGATTTTACTTTTA
CACCTCGAAAACAACTGTAGCGTCGCTTATCAACACACTTAACGATCTAAATGAA
ACTCTTGTTACAATGCCACTTGGCTATGTAACACATGGCTTAAATTTGGAAGAAG
CTGCTCGGTATATGAGATCGCTCAAAGTGCCAGCTACAGTTTCGGTTTCGTCGCC
TGATGCTGTTACAGCGTATAATGGTTATCTTACTTCGTCGTCGAAAACACCTGAA
GAACATTTTATTGAAACCATCTCGCTTGCTGGTTCGTATAAAGATTGGTCGTATTC
GGGACAATCGACACAACTAGGTATAGAATTTCTTAAGAGAGGTGATAAATCGGT
ATATTACACTTCGAATCCTACCACATTCCACCTAGATGGTGAAGTTATCACCTTT
GACAATCTTAAGACACTTCTTTCGTTGAGAGAAGTGAGGACTATTAAGGTGTTTA
CAACAGTAGACAACATTAACCTCCACACGCAAGTTGTGGACATGTCGATGACAT
ATGGACAACAGTTTGGTCCAACTTATTTGGATGGAGCTGATGTTACTAAAATAAA
ACCTCATAATTCGCATGAAGGTAAAACATTTTATGTTTTACCTAATGATGACACT
CTACGTGTTGAGGCTTTTGAGTACTACCACACAACTGATCCTTCGTTTCTGGGTA
GGTACATGTCGGCATTAAATCACACTAAAAAGTGGAAATACCCACAAGTTAATG
GTTTAACTTCGATTAAATGGGCAGATAACAACTGTTATCTTGCCACTGCATTGTT
AACACTCCAACAAATAGAGTTGAAGTTTAATCCACCTGCTCTACAAGATGCTTAT
TACAGAGCAAGGGCTGGTGAAGCTGCTAACTTTTGTGCACTTATCTTAGCCTACT
GTAATAAGACAGTAGGTGAGTTAGGTGATGTTAGAGAAACAATGTCGTACTTGTT
TCAACATGCCAATTTAGATTCGTGCAAAAGAGTCTTGAACGTGGTGTGTAAAACT
TGTGGACAACAGCAGACAACCCTTAAGGGTGTAGAAGCTGTTATGTACATGGGC
ACACTTTCGTATGAACAATTTAAGAAAGGTGTTCAGATACCTTGTACGTGTGGTA
AACAAGCTACAAAATATCTAGTACAACAGGAGTCGCCTTTTGTTATGATGTCGGC
ACCACCTGCTCAGTATGAACTTAAGCATGGTACATTTACTTGTGCTTCGGAGTAC
ACTGGTAATTACCAGTGTGGTCACTATAAACATATAACTTCGAAAGAAACTTTGT
ATTGCATAGACGGTGCTTTACTTACAAAGTCGTCGGAATACAAAGGTCCTATTAC
GGATGTTTTCTACAAAGAAAACTCGTACACAACAACCATAAAACCAGTTACTTAT
AAATTGGATGGTGTTGTTTGTACAGAAATTGACCCTAAGTTGGACAATTATTATA
AGAAAGACAATTCGTATTTCACAGAGCAACCAATTGATCTTGTACCAAACCAAC
CATATCCAAACGCATCGTTCGATAATTTTAAGTTTGTATGTGATAATATCAAATTT
GCTGATGATTTAAACCAGTTAACTGGTTATAAGAAACCTGCTTCGAGAGAGCTTA
AAGTTACATTTTTCCCTGACTTAAATGGTGATGTGGTGGCTATTGATTATAAACA
CTACACACCCTCGTTTAAGAAAGGAGCTAAATTGTTACATAAACCTATTGTTTGG
CATGTTAACAATGCAACTAATAAAGCCACGTATAAACCAAATACCTGGTGTATA
CGTTGTCTTTGGTCGACAAAACCAGTTGAAACATCGAATTCGTTTGATGTACTGA
AGTCGGAGGACGCGCAGGGAATGGATAATCTTGCCTGCGAAGATCTAAAACCAG
TCTCGGAAGAAGTAGTGGAAAATCCTACCATACAGAAAGACGTTCTTGAGTGTA
ATGTGAAAACTACCGAAGTTGTAGGAGACATTATACTTAAACCAGCAAATAATT
CGTTAAAAATTACAGAAGAGGTTGGCCACACAGATCTAATGGCTGCTTATGTAG
ACAATTCGTCGCTTACTATTAAGAAACCTAATGAATTATCGAGAGTATTAGGTTT
GAAAACCCTTGCTACTCATGGTTTAGCTGCTGTTAATTCGGTCCCTTGGGATACT
ATAGCTAATTATGCTAAGCCTTTTCTTAACAAAGTTGTTTCGACAACTACTAACAT
AGTTACACGGTGTTTAAACCGTGTTTGTACTAATTATATGCCTTATTTCTTTACTT
TATTGCTACAATTGTGTACTTTTACTAGATCGACAAATTCGAGAATTAAAGCATC
GATGCCGACTACTATAGCAAAGAATACTGTTAAGTCGGTCGGTAAATTTTGTCTA
GAGGCTTCGTTTAATTATTTGAAGTCGCCTAATTTTTCGAAACTGATAAATATTAT
AATTTGGTTTTTACTATTATCGGTTTGCCTAGGTTCTTTAATCTACTCAACCGCTG
CTTTAGGTGTTTTAATGTCTAATTTAGGCATGCCTTCTTACTGTACTGGTTACAGA
GAAGGCTATTTGAACTCTACTAATGTCACTATTGCAACCTACTGTACTGGTTCTAT
ACCTTGTAGTGTTTGTCTTAGTGGTTTAGATTCTTTAGACACCTATCCTTCTTTAG
AAACTATACAAATTACCATTTCATCTTTTAAATGGGATTTAACTGCTTTTGGCTTA
GTTGCAGAGTGGTTTTTGGCATATATTCTTTTCACTAGGTTTTTCTATGTACTTGG
ATTGGCTGCAATCATGCAATTGTTTTTCAGCTATTTTGCAGTACATTTTATTAGTA
ATTCTTGGCTTATGTGGTTAATAATTAATCTTGTACAAATGGCCCCGATTTCAGCT
ATGGTTAGAATGTACATCTTCTTTGCATCATTTTATTATGTATGGAAAAGTTATGT
GCATGTTGTAGACGGTTGTAATTCATCAACTTGTATGATGTGTTACAAACGTAAT
AGAGCAACAAGAGTCGAATGTACAACTATTGTTAATGGTGTTAGAAGGTCCTTTT
ATGTCTATGCTAATGGAGGTAAAGGCTTTTGCAAACTACACAATTGGAATTGTGT
TAATTGTGATACATTCTGTGCTGGTAGTACATTTATTAGTGATGAAGTTGCGAGA
GACTTGTCACTACAGTTTAAAAGACCAATAAATCCTACTGACCAGTCTTCTTACA
TCGTTGATAGTGTTACAGTGAAGAATGGTTCCATCCATCTTTACTTTGATAAAGCT
GGTCAAAAGACTTATGAAAGACATTCTCTCTCTCATTTTGTTAACTTAGACAACC
TGAGAGCTAATAACACTAAAGGTTCATTGCCTATTAATGTTATAGTTTTTGATGG
TAAATCAAAATGTGAAGAATCATCTGCAAAATCAGCGTCTGTTTACTACAGTCAG
CTTATGTGTCAACCTATACTGTTACTAGATCAGGCATTAGTGTCTGATGTTGGTGA
TAGTGCGGAAGTTGCAGTTAAAATGTTTGATGCTTACGTTAATACGTTTTCATCA
ACTTTTAACGTACCAATGGAAAAACTCAAAACACTAGTTGCAACTGCAGAAGCT
GAACTTGCAAAGAATGTGTCCTTAGACAATGTCTTATCTACTTTTATTTCAGCAGC
TCGGCAAGGGTTTGTTGATTCAGATGTAGAAACTAAAGATGTTGTTGAATGTCTT
AAATTGTCACATCAATCTGACATAGAAGTTACTGGCGATAGTTGTAATAACTATA
TGCTCACCTATAACAAAGTTGAAAACATGACACCCCGTGACCTTGGTGCTTGTAT
TGACTGTAGTGCGCGTCATATTAATGCGCAGGTAGCAAAAAGTCACAACATTGCT
TTGATATGGAACGTTAAAGATTTCATGTCATTGTCTGAACAACTACGAAAACAAA
TACGTAGTGCTGCTAAAAAGAATAACTTACCTTTTAAGTTGACATGTGCAACTAC
TAGACAAGTTGTTAATGTTGTAACAACAAAGATAGCACTTAAGGGTGGTAAAAT
TGTTAATAATTGGTTGAAGCAGTTAATTAAA
SEQ ID NO: 50 - Clone pCC1-4K-SARS-COV-2-160-5. Only fragments 1 and 3
have been deoptimized:
GGGTCCCACGTGCTTCGGCTAACATAGGTTGTAACCATACAGGTGTTG
TTGGAGAAGGTTCGGAAGGTCTTAATGACAACCTTCTTGAAATACTCCAAAAAG
AGAAAGTCAACATCAATATTGTTGGTGACTTTAAACTTAATGAAGAGATCGCCAT
TATTTTGGCATCGTTTTCGGCTTCGACATCGGCTTTTGTGGAAACTGTGAAAGGTT
TGGATTATAAAGCATTCAAACAAATTGTTGAATCGTGTGGTAATTTTAAAGTTAC
AAAAGGAAAAGCTAAAAAAGGTGCCTGGAATATTGGTGAACAGAAATCGATACT
GTCGCCTCTTTATGCATTTGCATCGGAGGCTGCTCGTGTTGTACGATCGATTTTCT
CGCGCACTCTTGAAACTGCTCAAAATTCGGTGCGTGTTTTACAGAAGGCCGCTAT
AACAATACTAGATGGAATTTCGCAGTATTCGCTGAGACTCATTGATGCTATGATG
TTCACATCGGATTTGGCTACTAACAATCTAGTTGTAATGGCCTACATTACAGGTG
GTGTTGTTCAGTTGACTTCGCAGTGGCTAACTAACATCTTTGGCACTGTTTATGAA
AAACTCAAACCCGTCCTTGATTGGCTTGAAGAGAAGTTTAAGGAAGGTGTAGAG
TTTCTTAGAGACGGTTGGGAAATTGTTAAATTTATCTCGACCTGTGCTTGTGAAAT
TGTCGGTGGACAAATTGTCACCTGTGCAAAGGAAATTAAGGAGTCGGTTCAGAC
ATTCTTTAAGCTTGTAAATAAATTTTTGGCTTTGTGTGCTGACTCGATCATTATTG
GTGGAGCTAAACTTAAAGCCTTGAATTTAGGTGAAACATTTGTCACGCACTCGAA
GGGATTGTACAGAAAGTGTGTTAAATCGAGAGAAGAAACTGGCCTACTCATGCC
TCTAAAAGCCCCAAAAGAAATTATCTTCTTAGAGGGAGAAACACTTCCCACAGA
AGTGTTAACAGAGGAAGTTGTCTTGAAAACTGGTGATTTACAACCATTAGAACA
ACCTACTTCGGAAGCTGTTGAAGCTCCATTGGTTGGTACACCAGTTTGTATTAAC
GGGCTTATGTTGCTCGAAATCAAAGACACAGAAAAGTACTGTGCCCTTGCACCTA
ATATGATGGTAACAAACAATACCTTCACACTCAAAGGCGGTGCACCAACAAAGG
TTACTTTTGGTGATGACACTGTGATAGAAGTGCAAGGTTACAAGTCGGTGAATAT
CACTTTTGAACTTGATGAAAGGATTGATAAAGTACTTAATGAGAAGTGCTCGGCC
TATACAGTTGAACTCGGTACAGAAGTAAATGAGTTCGCCTGTGTTGTGGCAGATG
CTGTCATAAAAACTTTGCAACCAGTATCGGAATTACTTACACCACTGGGCATTGA
TTTAGATGAGTGGTCGATGGCTACATACTACTTATTTGATGAGTCGGGTGAGTTT
AAATTGGCTTCGCATATGTATTGTTCGTTCTACCCTCCAGATGAGGATGAAGAAG
AAGGTGATTGTGAAGAAGAAGAGTTTGAGCCATCGACTCAATATGAGTATGGTA
CTGAAGATGATTACCAAGGTAAACCTTTGGAATTTGGTGCCACTTCGGCTGCTCT
TCAACCTGAAGAAGAGCAAGAAGAAGATTGGTTAGATGATGATTCGCAACAAAC
TGTTGGTCAACAAGACGGCTCGGAGGACAATCAGACAACTACTATTCAAACAAT
TGTTGAGGTTCAACCTCAATTAGAGATGGAACTTACACCAGTTGTTCAGACTATT
GAAGTGAATTCGTTTTCGGGTTATTTAAAACTTACTGACAATGTATACATTAAAA
ATGCAGACATTGTGGAAGAAGCTAAAAAGGTAAAACCAACAGTGGTTGTTAATG
CAGCCAATGTTTACCTTAAACATGGAGGAGGTGTTGCAGGAGCCTTAAATAAGG
CTACTAACAATGCCATGCAAGTTGAATCGGATGATTACATAGCTACTAATGGACC
ACTTAAAGTGGGTGGTTCGTGTGTTTTATCGGGACACAATCTTGCTAAACACTGT
CTTCATGTTGTCGGCCCAAATGTTAACAAAGGTGAAGACATTCAACTTCTTAAGT
CGGCTTATGAAAATTTTAATCAGCACGAAGTTCTACTTGCACCATTATTATCGGC
TGGTATTTTTGGTGCTGACCCTATACATTCGTTAAGAGTTTGTGTAGATACTGTTC
GCACAAATGTCTACTTAGCTGTCTTTGATAAAAATCTCTATGACAAACTTGTTTCG
TCGTTTTTGGAAATGAAGTCGGAAAAGCAAGTTGAACAAAAGATCGCTGAGATT
CCTAAAGAGGAAGTTAAGCCATTTATAACTGAATCGAAACCTTCGGTTGAACAG
AGAAAACAAGATGATAAGAAAATCAAAGCTTGTGTTGAAGAAGTTACAACAACT
CTGGAAGAAACTAAGTTCCTCACAGAAAACTTGTTACTTTATATTGACATTAATG
GCAATCTTCATCCAGATTCGGCCACTCTTGTTTCGGACATTGACATCACTTTCTTA
AAGAAAGATGCTCCATATATAGTGGGTGATGTTGTTCAAGAGGGTGTTTTAACTG
CTGTGGTTATACCTACTAAAAAGGCTGGTGGCACTACTGAAATGCTAGCGAAAG
CTTTGAGAAAAGTGCCAACAGACAATTATATAACCACTTACCCGGGTCAGGGTTT
AAATGGTTACACTGTAGAGGAGGCAAAGACAGTGCTTAAAAAGTGTAAAAGTGC
CTTTTACATTCTACCATCTATTATCTCTAATGAGAAGCAAGAAATTCTTGGAACTG
TTTCTTGGAATTTGCGAGAAATGCTTGCACATGCAGAAGAAACACGCAAATTAAT
GCCTGTCTGTGTGGAAACTAAAGCCATAGTTTCAACTATACAGCGTAAATATAAG
GGTATTAAAATACAAGAGGGTGTGGTTGATTATGGTGCTAGATTTTACTTTTACA
CCAGTAAAACAACTGTAGCGTCACTTATCAACACACTTAACGATCTAAATGAAA
CTCTTGTTACAATGCCACTTGGCTATGTAACACATGGCTTAAATTTGGAAGAAGC
TGCTCGGTATATGAGATCTCTCAAAGTGCCAGCTACAGTTTCTGTTTCTTCACCTG
ATGCTGTTACAGCGTATAATGGTTATCTTACTTCTTCTTCTAAAACACCTGAAGAA
CATTTTATTGAAACCATCTCACTTGCTGGTTCCTATAAAGATTGGTCCTATTCTGG
ACAATCTACACAACTAGGTATAGAATTTCTTAAGAGAGGTGATAAAAGTGTATAT
TACACTAGTAATCCTACCACATTCCACCTAGATGGTGAAGTTATCACCTTTGACA
ATCTTAAGACACTTCTTTCTTTGAGAGAAGTGAGGACTATTAAGGTGTTTACAAC
AGTAGACAACATTAACCTCCACACGCAAGTTGTGGACATGTCAATGACATATGG
ACAACAGTTTGGTCCAACTTATTTGGATGGAGCTGATGTTACTAAAATAAAACCT
CATAATTCACATGAAGGTAAAACATTTTATGTTTTACCTAATGATGACACTCTAC
GTGTTGAGGCTTTTGAGTACTACCACACAACTGATCCTAGTTTTCTGGGTAGGTA
CATGTCAGCATTAAATCACACTAAAAAGTGGAAATACCCACAAGTTAATGGTTT
AACTTCTATTAAATGGGCAGATAACAACTGTTATCTTGCCACTGCATTGTTAACA
CTCCAACAAATAGAGTTGAAGTTTAATCCACCTGCTCTACAAGATGCTTATTACA
GAGCAAGGGCTGGTGAAGCTGCTAACTTTTGTGCACTTATCTTAGCCTACTGTAA
TAAGACAGTAGGTGAGTTAGGTGATGTTAGAGAAACAATGAGTTACTTGTTTCAA
CATGCCAATTTAGATTCTTGCAAAAGAGTCTTGAACGTGGTGTGTAAAACTTGTG
GACAACAGCAGACAACCCTTAAGGGTGTAGAAGCTGTTATGTACATGGGCACAC
TTTCTTATGAACAATTTAAGAAAGGTGTTCAGATACCTTGTACGTGTGGTAAACA
AGCTACAAAATATCTAGTACAACAGGAGTCACCTTTTGTTATGATGTCAGCACCA
CCTGCTCAGTATGAACTTAAGCATGGTACATTTACTTGTGCTAGTGAGTACACTG
GTAATTACCAGTGTGGTCACTATAAACATATAACTTCTAAAGAAACTTTGTATTG
CATAGACGGTGCTTTACTTACAAAGTCCTCAGAATACAAAGGTCCTATTACGGAT
GTTTTCTACAAAGAAAACAGTTACACAACAACCATAAAACCAGTTACTTATAAAT
TGGATGGTGTTGTTTGTACAGAAATTGACCCTAAGTTGGACAATTATTATAAGAA
AGACAATTCTTATTTCACAGAGCAACCAATTGATCTTGTACCAAACCAACCATAT
CCAAACGCAAGCTTCGATAATTTTAAGTTTGTATGTGATAATATCAAATTTGCTG
ATGATTTAAACCAGTTAACTGGTTATAAGAAACCTGCTTCAAGAGAGCTTAAAGT
TACATTTTTCCCTGACTTAAATGGTGATGTGGTGGCTATTGATTATAAACACTACA
CACCCTCTTTTAAGAAAGGAGCTAAATTGTTACATAAACCTATTGTTTGGCATGT
TAACAATGCAACTAATAAAGCCACGTATAAACCAAATACCTGGTGTATACGTTGT
CTTTGGAGCACAAAACCAGTTGAAACATCAAATTCGTTTGATGTACTGAAGTCAG
AGGACGCGCAGGGAATGGATAATCTTGCCTGCGAAGATCTAAAACCAGTCTCTG
AAGAAGTAGTGGAAAATCCTACCATACAGAAAGACGTTCTTGAGTGTAATGTGA
AAACTACCGAAGTTGTAGGAGACATTATACTTAAACCAGCAAATAATAGTTTAA
AAATTACAGAAGAGGTTGGCCACACAGATCTAATGGCTGCTTATGTAGACAATT
CTAGTCTTACTATTAAGAAACCTAATGAATTATCTAGAGTATTAGGTTTGAAAAC
CCTTGCTACTCATGGTTTAGCTGCTGTTAATAGTGTCCCTTGGGATACTATAGCTA
ATTATGCTAAGCCTTTTCTTAACAAAGTTGTTAGTACAACTACTAACATAGTTAC
ACGGTGTTTAAACCGTGTTTGTACTAATTATATGCCTTATTTCTTTACTTTATTGCT
ACAATTGTGTACTTTTACTAGAAGTACAAATTCTAGAATTAAAGCATCTATGCCG
ACTACTATAGCAAAGAATACTGTTAAGAGTGTCGGTAAATTTTGTCTAGAGGCTT
CATTTAATTATTTGAAGTCACCTAATTTTTCTAAACTGATAAATATTATAATTTGG
TTTTTACTATTAAGTGTTTGCCTAGGTTCGTTAATCTACTCGACCGCTGCTTTAGG
TGTTTTAATGTCGAATTTAGGCATGCCTTCGTACTGTACTGGTTACAGAGAAGGC
TATTTGAACTCGACTAATGTCACTATTGCAACCTACTGTACTGGTTCGATACCTTG
TTCGGTTTGTCTTTCGGGTTTAGATTCGTTAGACACCTATCCTTCGTTAGAAACTA
TACAAATTACCATTTCGTCGTTTAAATGGGATTTAACTGCTTTTGGCTTAGTTGCA
GAGTGGTTTTTGGCATATATTCTTTTCACTAGGTTTTTCTATGTACTTGGATTGGC
TGCAATCATGCAATTGTTTTTCTCGTATTTTGCAGTACATTTTATTTCGAATTCGT
GGCTTATGTGGTTAATAATTAATCTTGTACAAATGGCCCCGATTTCGGCTATGGTT
AGAATGTACATCTTCTTTGCATCGTTTTATTATGTATGGAAATCGTATGTGCATGT
TGTAGACGGTTGTAATTCGTCGACTTGTATGATGTGTTACAAACGTAATAGAGCA
ACAAGAGTCGAATGTACAACTATTGTTAATGGTGTTAGAAGGTCGTTTTATGTCT
ATGCTAATGGAGGTAAAGGCTTTTGCAAACTACACAATTGGAATTGTGTTAATTG
TGATACATTCTGTGCTGGTTCGACATTTATTTCGGATGAAGTTGCGAGAGACTTG
TCGCTACAGTTTAAAAGACCAATAAATCCTACTGACCAGTCGTCGTACATCGTTG
ATTCGGTTACAGTGAAGAATGGTTCGATCCATCTTTACTTTGATAAAGCTGGTCA
AAAGACTTATGAAAGACATTCGCTCTCGCATTTTGTTAACTTAGACAACCTGAGA
GCTAATAACACTAAAGGTTCGTTGCCTATTAATGTTATAGTTTTTGATGGTAAATC
GAAATGTGAAGAATCGTCGGCAAAATCGGCGTCGGTTTACTACTCGCAGCTTATG
TGTCAACCTATACTGTTACTAGATCAGGCATTAGTGTCGGATGTTGGTGATTCGG
CGGAAGTTGCAGTTAAAATGTTTGATGCTTACGTTAATACGTTTTCGTCGACTTTT
AACGTACCAATGGAAAAACTCAAAACACTAGTTGCAACTGCAGAAGCTGAACTT
GCAAAGAATGTGTCGTTAGACAATGTCTTATCGACTTTTATTTCGGCAGCTCGGC
AAGGGTTTGTTGATTCGGATGTAGAAACTAAAGATGTTGTTGAATGTCTTAAATT
GTCGCATCAATCGGACATAGAAGTTACTGGCGATTCGTGTAATAACTATATGCTC
ACCTATAACAAAGTTGAAAACATGACACCCCGTGACCTTGGTGCTTGTATTGACT
GTTCGGCGCGTCATATTAATGCGCAGGTAGCAAAATCGCACAACATTGCTTTGAT
ATGGAACGTTAAAGATTTCATGTCGTTGTCGGAACAACTACGAAAACAAATACG
TTCGGCTGCTAAAAAGAATAACTTACCTTTTAAGTTGACATGTGCAACTACTAGA
CAAGTTGTTAATGTTGTAACAACAAAGATAGCACTTAAGGGTGGTAAAATTGTTA
ATAATTGGTTGAAGCAGTTAATTAAA
SEQ ID NO: 51 - Clone pCC1-4K-SARS-COV-2-160-6. Only fragments 2 and 3
have been deoptimized:
GGGTCCCACGTGCTAGCGCTAACATAGGTTGTAACCATACAGGTGTTG
TTGGAGAAGGTTCCGAAGGTCTTAATGACAACCTTCTTGAAATACTCCAAAAAG
AGAAAGTCAACATCAATATTGTTGGTGACTTTAAACTTAATGAAGAGATCGCCAT
TATTTTGGCATCTTTTTCTGCTTCCACAAGTGCTTTTGTGGAAACTGTGAAAGGTT
TGGATTATAAAGCATTCAAACAAATTGTTGAATCCTGTGGTAATTTTAAAGTTAC
AAAAGGAAAAGCTAAAAAAGGTGCCTGGAATATTGGTGAACAGAAATCAATACT
GAGTCCTCTTTATGCATTTGCATCAGAGGCTGCTCGTGTTGTACGATCAATTTTCT
CCCGCACTCTTGAAACTGCTCAAAATTCTGTGCGTGTTTTACAGAAGGCCGCTAT
AACAATACTAGATGGAATTTCACAGTATTCACTGAGACTCATTGATGCTATGATG
TTCACATCTGATTTGGCTACTAACAATCTAGTTGTAATGGCCTACATTACAGGTG
GTGTTGTTCAGTTGACTTCGCAGTGGCTAACTAACATCTTTGGCACTGTTTATGAA
AAACTCAAACCCGTCCTTGATTGGCTTGAAGAGAAGTTTAAGGAAGGTGTAGAG
TTTCTTAGAGACGGTTGGGAAATTGTTAAATTTATCTCAACCTGTGCTTGTGAAAT
TGTCGGTGGACAAATTGTCACCTGTGCAAAGGAAATTAAGGAGAGTGTTCAGAC
ATTCTTTAAGCTTGTAAATAAATTTTTGGCTTTGTGTGCTGACTCTATCATTATTG
GTGGAGCTAAACTTAAAGCCTTGAATTTAGGTGAAACATTTGTCACGCACTCAAA
GGGATTGTACAGAAAGTGTGTTAAATCCAGAGAAGAAACTGGCCTACTCATGCC
TCTAAAAGCCCCAAAAGAAATTATCTTCTTAGAGGGAGAAACACTTCCCACAGA
AGTGTTAACAGAGGAAGTTGTCTTGAAAACTGGTGATTTACAACCATTAGAACA
ACCTACTAGTGAAGCTGTTGAAGCTCCATTGGTTGGTACACCAGTTTGTATTAAC
GGGCTTATGTTGCTCGAAATCAAAGACACAGAAAAGTACTGTGCCCTTGCACCTA
ATATGATGGTAACAAACAATACCTTCACACTCAAAGGCGGTGCACCAACAAAGG
TTACTTTTGGTGATGACACTGTGATAGAAGTGCAAGGTTACAAGAGTGTGAATAT
CACTTTTGAACTTGATGAAAGGATTGATAAAGTACTTAATGAGAAGTGCTCTGCC
TATACAGTTGAACTCGGTACAGAAGTAAATGAGTTCGCCTGTGTTGTGGCAGATG
CTGTCATAAAAACTTTGCAACCAGTATCTGAATTACTTACACCACTGGGCATTGA
TTTAGATGAGTGGAGTATGGCTACATACTACTTATTTGATGAGTCTGGTGAGTTT
AAATTGGCTTCACATATGTATTGTTCTTTCTACCCTCCAGATGAGGATGAAGAAG
AAGGTGATTGTGAAGAAGAAGAGTTTGAGCCATCAACTCAATATGAGTATGGTA
CTGAAGATGATTACCAAGGTAAACCTTTGGAATTTGGTGCCACTTCTGCTGCTCT
TCAACCTGAAGAAGAGCAAGAAGAAGATTGGTTAGATGATGATAGTCAACAAAC
TGTTGGTCAACAAGACGGCAGTGAGGACAATCAGACAACTACTATTCAAACAAT
TGTTGAGGTTCAACCTCAATTAGAGATGGAACTTACACCAGTTGTTCAGACTATT
GAAGTGAATAGTTTTAGTGGTTATTTAAAACTTACTGACAATGTATACATTAAAA
ATGCAGACATTGTGGAAGAAGCTAAAAAGGTAAAACCAACAGTGGTTGTTAATG
CAGCCAATGTTTACCTTAAACATGGAGGAGGTGTTGCAGGAGCCTTAAATAAGG
CTACTAACAATGCCATGCAAGTTGAATCTGATGATTACATAGCTACTAATGGACC
ACTTAAAGTGGGTGGTAGTTGTGTTTTAAGCGGACACAATCTTGCTAAACACTGT
CTTCATGTTGTCGGCCCAAATGTTAACAAAGGTGAAGACATTCAACTTCTTAAGA
GTGCTTATGAAAATTTTAATCAGCACGAAGTTCTACTTGCACCATTATTATCAGCT
GGTATTTTTGGTGCTGACCCTATACATTCTTTAAGAGTTTGTGTAGATACTGTTCG
CACAAATGTCTACTTAGCTGTCTTTGATAAAAATCTCTATGACAAACTTGTTTCAA
GCTTTTTGGAAATGAAGAGTGAAAAGCAAGTTGAACAAAAGATCGCTGAGATTC
CTAAAGAGGAAGTTAAGCCATTTATAACTGAAAGTAAACCTTCAGTTGAACAGA
GAAAACAAGATGATAAGAAAATCAAAGCTTGTGTTGAAGAAGTTACAACAACTC
TGGAAGAAACTAAGTTCCTCACAGAAAACTTGTTACTTTATATTGACATTAATGG
CAATCTTCATCCAGATTCTGCCACTCTTGTTAGTGACATTGACATCACTTTCTTAA
AGAAAGATGCTCCATATATAGTGGGTGATGTTGTTCAAGAGGGTGTTTTAACTGC
TGTGGTTATACCTACTAAAAAGGCTGGTGGCACTACTGAAATGCTAGCGAAAGC
TTTGAGAAAAGTGCCAACAGACAATTATATAACCACTTACCCGGGTCAGGGTTTA
AATGGTTACACTGTAGAGGAGGCAAAGACAGTGCTTAAAAAGTGTAAATCGGCC
TTTTACATTCTACCATCGATTATCTCGAATGAGAAGCAAGAAATTCTTGGAACTG
TTTCGTGGAATTTGCGAGAAATGCTTGCACATGCAGAAGAAACACGCAAATTAA
TGCCTGTCTGTGTGGAAACTAAAGCCATAGTTTCGACTATACAGCGTAAATATAA
GGGTATTAAAATACAAGAGGGTGTGGTTGATTATGGTGCTAGATTTTACTTTTAC
ACCTCGAAAACAACTGTAGCGTCGCTTATCAACACACTTAACGATCTAAATGAA
ACTCTTGTTACAATGCCACTTGGCTATGTAACACATGGCTTAAATTTGGAAGAAG
CTGCTCGGTATATGAGATCGCTCAAAGTGCCAGCTACAGTTTCGGTTTCGTCGCC
TGATGCTGTTACAGCGTATAATGGTTATCTTACTTCGTCGTCGAAAACACCTGAA
GAACATTTTATTGAAACCATCTCGCTTGCTGGTTCGTATAAAGATTGGTCGTATTC
GGGACAATCGACACAACTAGGTATAGAATTTCTTAAGAGAGGTGATAAATCGGT
ATATTACACTTCGAATCCTACCACATTCCACCTAGATGGTGAAGTTATCACCTTT
GACAATCTTAAGACACTTCTTTCGTTGAGAGAAGTGAGGACTATTAAGGTGTTTA
CAACAGTAGACAACATTAACCTCCACACGCAAGTTGTGGACATGTCGATGACAT
ATGGACAACAGTTTGGTCCAACTTATTTGGATGGAGCTGATGTTACTAAAATAAA
ACCTCATAATTCGCATGAAGGTAAAACATTTTATGTTTTACCTAATGATGACACT
CTACGTGTTGAGGCTTTTGAGTACTACCACACAACTGATCCTTCGTTTCTGGGTA
GGTACATGTCGGCATTAAATCACACTAAAAAGTGGAAATACCCACAAGTTAATG
GTTTAACTTCGATTAAATGGGCAGATAACAACTGTTATCTTGCCACTGCATTGTT
AACACTCCAACAAATAGAGTTGAAGTTTAATCCACCTGCTCTACAAGATGCTTAT
TACAGAGCAAGGGCTGGTGAAGCTGCTAACTTTTGTGCACTTATCTTAGCCTACT
GTAATAAGACAGTAGGTGAGTTAGGTGATGTTAGAGAAACAATGTCGTACTTGTT
TCAACATGCCAATTTAGATTCGTGCAAAAGAGTCTTGAACGTGGTGTGTAAAACT
TGTGGACAACAGCAGACAACCCTTAAGGGTGTAGAAGCTGTTATGTACATGGGC
ACACTTTCGTATGAACAATTTAAGAAAGGTGTTCAGATACCTTGTACGTGTGGTA
AACAAGCTACAAAATATCTAGTACAACAGGAGTCGCCTTTTGTTATGATGTCGGC
ACCACCTGCTCAGTATGAACTTAAGCATGGTACATTTACTTGTGCTTCGGAGTAC
ACTGGTAATTACCAGTGTGGTCACTATAAACATATAACTTCGAAAGAAACTTTGT
ATTGCATAGACGGTGCTTTACTTACAAAGTCGTCGGAATACAAAGGTCCTATTAC
GGATGTTTTCTACAAAGAAAACTCGTACACAACAACCATAAAACCAGTTACTTAT
AAATTGGATGGTGTTGTTTGTACAGAAATTGACCCTAAGTTGGACAATTATTATA
AGAAAGACAATTCGTATTTCACAGAGCAACCAATTGATCTTGTACCAAACCAAC
CATATCCAAACGCATCGTTCGATAATTTTAAGTTTGTATGTGATAATATCAAATTT
GCTGATGATTTAAACCAGTTAACTGGTTATAAGAAACCTGCTTCGAGAGAGCTTA
AAGTTACATTTTTCCCTGACTTAAATGGTGATGTGGTGGCTATTGATTATAAACA
CTACACACCCTCGTTTAAGAAAGGAGCTAAATTGTTACATAAACCTATTGTTTGG
CATGTTAACAATGCAACTAATAAAGCCACGTATAAACCAAATACCTGGTGTATA
CGTTGTCTTTGGTCGACAAAACCAGTTGAAACATCGAATTCGTTTGATGTACTGA
AGTCGGAGGACGCGCAGGGAATGGATAATCTTGCCTGCGAAGATCTAAAACCAG
TCTCGGAAGAAGTAGTGGAAAATCCTACCATACAGAAAGACGTTCTTGAGTGTA
ATGTGAAAACTACCGAAGTTGTAGGAGACATTATACTTAAACCAGCAAATAATT
CGTTAAAAATTACAGAAGAGGTTGGCCACACAGATCTAATGGCTGCTTATGTAG
ACAATTCGTCGCTTACTATTAAGAAACCTAATGAATTATCGAGAGTATTAGGTTT
GAAAACCCTTGCTACTCATGGTTTAGCTGCTGTTAATTCGGTCCCTTGGGATACT
ATAGCTAATTATGCTAAGCCTTTTCTTAACAAAGTTGTTTCGACAACTACTAACAT
AGTTACACGGTGTTTAAACCGTGTTTGTACTAATTATATGCCTTATTTCTTTACTT
TATTGCTACAATTGTGTACTTTTACTAGATCGACAAATTCGAGAATTAAAGCATC
GATGCCGACTACTATAGCAAAGAATACTGTTAAGTCGGTCGGTAAATTTTGTCTA
GAGGCTTCGTTTAATTATTTGAAGTCGCCTAATTTTTCGAAACTGATAAATATTAT
AATTTGGTTTTTACTATTATCGGTTTGCCTAGGTTCGTTAATCTACTCGACCGCTG
CTTTAGGTGTTTTAATGTCGAATTTAGGCATGCCTTCGTACTGTACTGGTTACAGA
GAAGGCTATTTGAACTCGACTAATGTCACTATTGCAACCTACTGTACTGGTTCGA
TACCTTGTTCGGTTTGTCTTTCGGGTTTAGATTCGTTAGACACCTATCCTTCGTTA
GAAACTATACAAATTACCATTTCGTCGTTTAAATGGGATTTAACTGCTTTTGGCTT
AGTTGCAGAGTGGTTTTTGGCATATATTCTTTTCACTAGGTTTTTCTATGTACTTG
GATTGGCTGCAATCATGCAATTGTTTTTCTCGTATTTTGCAGTACATTTTATTTCG
AATTCGTGGCTTATGTGGTTAATAATTAATCTTGTACAAATGGCCCCGATTTCGG
CTATGGTTAGAATGTACATCTTCTTTGCATCGTTTTATTATGTATGGAAATCGTAT
GTGCATGTTGTAGACGGTTGTAATTCGTCGACTTGTATGATGTGTTACAAACGTA
ATAGAGCAACAAGAGTCGAATGTACAACTATTGTTAATGGTGTTAGAAGGTCGTT
TTATGTCTATGCTAATGGAGGTAAAGGCTTTTGCAAACTACACAATTGGAATTGT
GTTAATTGTGATACATTCTGTGCTGGTTCGACATTTATTTCGGATGAAGTTGCGAG
AGACTTGTCGCTACAGTTTAAAAGACCAATAAATCCTACTGACCAGTCGTCGTAC
ATCGTTGATTCGGTTACAGTGAAGAATGGTTCGATCCATCTTTACTTTGATAAAG
CTGGTCAAAAGACTTATGAAAGACATTCGCTCTCGCATTTTGTTAACTTAGACAA
CCTGAGAGCTAATAACACTAAAGGTTCGTTGCCTATTAATGTTATAGTTTTTGAT
GGTAAATCGAAATGTGAAGAATCGTCGGCAAAATCGGCGTCGGTTTACTACTCG
CAGCTTATGTGTCAACCTATACTGTTACTAGATCAGGCATTAGTGTCGGATGTTG
GTGATTCGGCGGAAGTTGCAGTTAAAATGTTTGATGCTTACGTTAATACGTTTTC
GTCGACTTTTAACGTACCAATGGAAAAACTCAAAACACTAGTTGCAACTGCAGA
AGCTGAACTTGCAAAGAATGTGTCGTTAGACAATGTCTTATCGACTTTTATTTCG
GCAGCTCGGCAAGGGTTTGTTGATTCGGATGTAGAAACTAAAGATGTTGTTGAAT
GTCTTAAATTGTCGCATCAATCGGACATAGAAGTTACTGGCGATTCGTGTAATAA
CTATATGCTCACCTATAACAAAGTTGAAAACATGACACCCCGTGACCTTGGTGCT
TGTATTGACTGTTCGGCGCGTCATATTAATGCGCAGGTAGCAAAATCGCACAACA
TTGCTTTGATATGGAACGTTAAAGATTTCATGTCGTTGTCGGAACAACTACGAAA
ACAAATACGTTCGGCTGCTAAAAAGAATAACTTACCTTTTAAGTTGACATGTGCA
ACTACTAGACAAGTTGTTAATGTTGTAACAACAAAGATAGCACTTAAGGGTGGT
AAAATTGTTAATAATTGGTTGAAGCAGTTAATTAAA
SEQ ID NO: 52 - Clone pCC1-4K-SARS-COV-2-160-7. All 3 fragments were
deoptimized. Deoptimized sequence between SanDI to PacI in ORF1a:
GGGTCCCACGTGCTTCGGCTAACATAGGTTGTAACCATACAGGTGTTG
TTGGAGAAGGTTCGGAAGGTCTTAATGACAACCTTCTTGAAATACTCCAAAAAG
AGAAAGTCAACATCAATATTGTTGGTGACTTTAAACTTAATGAAGAGATCGCCAT
TATTTTGGCATCGTTTTCGGCTTCGACATCGGCTTTTGTGGAAACTGTGAAAGGTT
TGGATTATAAAGCATTCAAACAAATTGTTGAATCGTGTGGTAATTTTAAAGTTAC
AAAAGGAAAAGCTAAAAAAGGTGCCTGGAATATTGGTGAACAGAAATCGATACT
GTCGCCTCTTTATGCATTTGCATCGGAGGCTGCTCGTGTTGTACGATCGATTTTCT
CGCGCACTCTTGAAACTGCTCAAAATTCGGTGCGTGTTTTACAGAAGGCCGCTAT
AACAATACTAGATGGAATTTCGCAGTATTCGCTGAGACTCATTGATGCTATGATG
TTCACATCGGATTTGGCTACTAACAATCTAGTTGTAATGGCCTACATTACAGGTG
GTGTTGTTCAGTTGACTTCGCAGTGGCTAACTAACATCTTTGGCACTGTTTATGAA
AAACTCAAACCCGTCCTTGATTGGCTTGAAGAGAAGTTTAAGGAAGGTGTAGAG
TTTCTTAGAGACGGTTGGGAAATTGTTAAATTTATCTCGACCTGTGCTTGTGAAAT
TGTCGGTGGACAAATTGTCACCTGTGCAAAGGAAATTAAGGAGTCGGTTCAGAC
ATTCTTTAAGCTTGTAAATAAATTTTTGGCTTTGTGTGCTGACTCGATCATTATTG
GTGGAGCTAAACTTAAAGCCTTGAATTTAGGTGAAACATTTGTCACGCACTCGAA
GGGATTGTACAGAAAGTGTGTTAAATCGAGAGAAGAAACTGGCCTACTCATGCC
TCTAAAAGCCCCAAAAGAAATTATCTTCTTAGAGGGAGAAACACTTCCCACAGA
AGTGTTAACAGAGGAAGTTGTCTTGAAAACTGGTGATTTACAACCATTAGAACA
ACCTACTTCGGAAGCTGTTGAAGCTCCATTGGTTGGTACACCAGTTTGTATTAAC
GGGCTTATGTTGCTCGAAATCAAAGACACAGAAAAGTACTGTGCCCTTGCACCTA
ATATGATGGTAACAAACAATACCTTCACACTCAAAGGCGGTGCACCAACAAAGG
TTACTTTTGGTGATGACACTGTGATAGAAGTGCAAGGTTACAAGTCGGTGAATAT
CACTTTTGAACTTGATGAAAGGATTGATAAAGTACTTAATGAGAAGTGCTCGGCC
TATACAGTTGAACTCGGTACAGAAGTAAATGAGTTCGCCTGTGTTGTGGCAGATG
CTGTCATAAAAACTTTGCAACCAGTATCGGAATTACTTACACCACTGGGCATTGA
TTTAGATGAGTGGTCGATGGCTACATACTACTTATTTGATGAGTCGGGTGAGTTT
AAATTGGCTTCGCATATGTATTGTTCGTTCTACCCTCCAGATGAGGATGAAGAAG
AAGGTGATTGTGAAGAAGAAGAGTTTGAGCCATCGACTCAATATGAGTATGGTA
CTGAAGATGATTACCAAGGTAAACCTTTGGAATTTGGTGCCACTTCGGCTGCTCT
TCAACCTGAAGAAGAGCAAGAAGAAGATTGGTTAGATGATGATTCGCAACAAAC
TGTTGGTCAACAAGACGGCTCGGAGGACAATCAGACAACTACTATTCAAACAAT
TGTTGAGGTTCAACCTCAATTAGAGATGGAACTTACACCAGTTGTTCAGACTATT
GAAGTGAATTCGTTTTCGGGTTATTTAAAACTTACTGACAATGTATACATTAAAA
ATGCAGACATTGTGGAAGAAGCTAAAAAGGTAAAACCAACAGTGGTTGTTAATG
CAGCCAATGTTTACCTTAAACATGGAGGAGGTGTTGCAGGAGCCTTAAATAAGG
CTACTAACAATGCCATGCAAGTTGAATCGGATGATTACATAGCTACTAATGGACC
ACTTAAAGTGGGTGGTTCGTGTGTTTTATCGGGACACAATCTTGCTAAACACTGT
CTTCATGTTGTCGGCCCAAATGTTAACAAAGGTGAAGACATTCAACTTCTTAAGT
CGGCTTATGAAAATTTTAATCAGCACGAAGTTCTACTTGCACCATTATTATCGGC
TGGTATTTTTGGTGCTGACCCTATACATTCGTTAAGAGTTTGTGTAGATACTGTTC
GCACAAATGTCTACTTAGCTGTCTTTGATAAAAATCTCTATGACAAACTTGTTTCG
TCGTTTTTGGAAATGAAGTCGGAAAAGCAAGTTGAACAAAAGATCGCTGAGATT
CCTAAAGAGGAAGTTAAGCCATTTATAACTGAATCGAAACCTTCGGTTGAACAG
AGAAAACAAGATGATAAGAAAATCAAAGCTTGTGTTGAAGAAGTTACAACAACT
CTGGAAGAAACTAAGTTCCTCACAGAAAACTTGTTACTTTATATTGACATTAATG
GCAATCTTCATCCAGATTCGGCCACTCTTGTTTCGGACATTGACATCACTTTCTTA
AAGAAAGATGCTCCATATATAGTGGGTGATGTTGTTCAAGAGGGTGTTTTAACTG
CTGTGGTTATACCTACTAAAAAGGCTGGTGGCACTACTGAAATGCTAGCGAAAG
CTTTGAGAAAAGTGCCAACAGACAATTATATAACCACTTACCCGGGTCAGGGTTT
AAATGGTTACACTGTAGAGGAGGCAAAGACAGTGCTTAAAAAGTGTAAATCGGC
CTTTTACATTCTACCATCGATTATCTCGAATGAGAAGCAAGAAATTCTTGGAACT
GTTTCGTGGAATTTGCGAGAAATGCTTGCACATGCAGAAGAAACACGCAAATTA
ATGCCTGTCTGTGTGGAAACTAAAGCCATAGTTTCGACTATACAGCGTAAATATA
AGGGTATTAAAATACAAGAGGGTGTGGTTGATTATGGTGCTAGATTTTACTTTTA
CACCTCGAAAACAACTGTAGCGTCGCTTATCAACACACTTAACGATCTAAATGAA
ACTCTTGTTACAATGCCACTTGGCTATGTAACACATGGCTTAAATTTGGAAGAAG
CTGCTCGGTATATGAGATCGCTCAAAGTGCCAGCTACAGTTTCGGTTTCGTCGCC
TGATGCTGTTACAGCGTATAATGGTTATCTTACTTCGTCGTCGAAAACACCTGAA
GAACATTTTATTGAAACCATCTCGCTTGCTGGTTCGTATAAAGATTGGTCGTATTC
GGGACAATCGACACAACTAGGTATAGAATTTCTTAAGAGAGGTGATAAATCGGT
ATATTACACTTCGAATCCTACCACATTCCACCTAGATGGTGAAGTTATCACCTTT
GACAATCTTAAGACACTTCTTTCGTTGAGAGAAGTGAGGACTATTAAGGTGTTTA
CAACAGTAGACAACATTAACCTCCACACGCAAGTTGTGGACATGTCGATGACAT
ATGGACAACAGTTTGGTCCAACTTATTTGGATGGAGCTGATGTTACTAAAATAAA
ACCTCATAATTCGCATGAAGGTAAAACATTTTATGTTTTACCTAATGATGACACT
CTACGTGTTGAGGCTTTTGAGTACTACCACACAACTGATCCTTCGTTTCTGGGTA
GGTACATGTCGGCATTAAATCACACTAAAAAGTGGAAATACCCACAAGTTAATG
GTTTAACTTCGATTAAATGGGCAGATAACAACTGTTATCTTGCCACTGCATTGTT
AACACTCCAACAAATAGAGTTGAAGTTTAATCCACCTGCTCTACAAGATGCTTAT
TACAGAGCAAGGGCTGGTGAAGCTGCTAACTTTTGTGCACTTATCTTAGCCTACT
GTAATAAGACAGTAGGTGAGTTAGGTGATGTTAGAGAAACAATGTCGTACTTGTT
TCAACATGCCAATTTAGATTCGTGCAAAAGAGTCTTGAACGTGGTGTGTAAAACT
TGTGGACAACAGCAGACAACCCTTAAGGGTGTAGAAGCTGTTATGTACATGGGC
ACACTTTCGTATGAACAATTTAAGAAAGGTGTTCAGATACCTTGTACGTGTGGTA
AACAAGCTACAAAATATCTAGTACAACAGGAGTCGCCTTTTGTTATGATGTCGGC
ACCACCTGCTCAGTATGAACTTAAGCATGGTACATTTACTTGTGCTTCGGAGTAC
ACTGGTAATTACCAGTGTGGTCACTATAAACATATAACTTCGAAAGAAACTTTGT
ATTGCATAGACGGTGCTTTACTTACAAAGTCGTCGGAATACAAAGGTCCTATTAC
GGATGTTTTCTACAAAGAAAACTCGTACACAACAACCATAAAACCAGTTACTTAT
AAATTGGATGGTGTTGTTTGTACAGAAATTGACCCTAAGTTGGACAATTATTATA
AGAAAGACAATTCGTATTTCACAGAGCAACCAATTGATCTTGTACCAAACCAAC
CATATCCAAACGCATCGTTCGATAATTTTAAGTTTGTATGTGATAATATCAAATTT
GCTGATGATTTAAACCAGTTAACTGGTTATAAGAAACCTGCTTCGAGAGAGCTTA
AAGTTACATTTTTCCCTGACTTAAATGGTGATGTGGTGGCTATTGATTATAAACA
CTACACACCCTCGTTTAAGAAAGGAGCTAAATTGTTACATAAACCTATTGTTTGG
CATGTTAACAATGCAACTAATAAAGCCACGTATAAACCAAATACCTGGTGTATA
CGTTGTCTTTGGTCGACAAAACCAGTTGAAACATCGAATTCGTTTGATGTACTGA
AGTCGGAGGACGCGCAGGGAATGGATAATCTTGCCTGCGAAGATCTAAAACCAG
TCTCGGAAGAAGTAGTGGAAAATCCTACCATACAGAAAGACGTTCTTGAGTGTA
ATGTGAAAACTACCGAAGTTGTAGGAGACATTATACTTAAACCAGCAAATAATT
CGTTAAAAATTACAGAAGAGGTTGGCCACACAGATCTAATGGCTGCTTATGTAG
ACAATTCGTCGCTTACTATTAAGAAACCTAATGAATTATCGAGAGTATTAGGTTT
GAAAACCCTTGCTACTCATGGTTTAGCTGCTGTTAATTCGGTCCCTTGGGATACT
ATAGCTAATTATGCTAAGCCTTTTCTTAACAAAGTTGTTTCGACAACTACTAACAT
AGTTACACGGTGTTTAAACCGTGTTTGTACTAATTATATGCCTTATTTCTTTACTT
TATTGCTACAATTGTGTACTTTTACTAGATCGACAAATTCGAGAATTAAAGCATC
GATGCCGACTACTATAGCAAAGAATACTGTTAAGTCGGTCGGTAAATTTTGTCTA
GAGGCTTCGTTTAATTATTTGAAGTCGCCTAATTTTTCGAAACTGATAAATATTAT
AATTTGGTTTTTACTATTATCGGTTTGCCTAGGTTCGTTAATCTACTCGACCGCTG
CTTTAGGTGTTTTAATGTCGAATTTAGGCATGCCTTCGTACTGTACTGGTTACAGA
GAAGGCTATTTGAACTCGACTAATGTCACTATTGCAACCTACTGTACTGGTTCGA
TACCTTGTTCGGTTTGTCTTTCGGGTTTAGATTCGTTAGACACCTATCCTTCGTTA
GAAACTATACAAATTACCATTTCGTCGTTTAAATGGGATTTAACTGCTTTTGGCTT
AGTTGCAGAGTGGTTTTTGGCATATATTCTTTTCACTAGGTTTTTCTATGTACTTG
GATTGGCTGCAATCATGCAATTGTTTTTCTCGTATTTTGCAGTACATTTTATTTCG
AATTCGTGGCTTATGTGGTTAATAATTAATCTTGTACAAATGGCCCCGATTTCGG
CTATGGTTAGAATGTACATCTTCTTTGCATCGTTTTATTATGTATGGAAATCGTAT
GTGCATGTTGTAGACGGTTGTAATTCGTCGACTTGTATGATGTGTTACAAACGTA
ATAGAGCAACAAGAGTCGAATGTACAACTATTGTTAATGGTGTTAGAAGGTCGTT
TTATGTCTATGCTAATGGAGGTAAAGGCTTTTGCAAACTACACAATTGGAATTGT
GTTAATTGTGATACATTCTGTGCTGGTTCGACATTTATTTCGGATGAAGTTGCGAG
AGACTTGTCGCTACAGTTTAAAAGACCAATAAATCCTACTGACCAGTCGTCGTAC
ATCGTTGATTCGGTTACAGTGAAGAATGGTTCGATCCATCTTTACTTTGATAAAG
CTGGTCAAAAGACTTATGAAAGACATTCGCTCTCGCATTTTGTTAACTTAGACAA
CCTGAGAGCTAATAACACTAAAGGTTCGTTGCCTATTAATGTTATAGTTTTTGAT
GGTAAATCGAAATGTGAAGAATCGTCGGCAAAATCGGCGTCGGTTTACTACTCG
CAGCTTATGTGTCAACCTATACTGTTACTAGATCAGGCATTAGTGTCGGATGTTG
GTGATTCGGCGGAAGTTGCAGTTAAAATGTTTGATGCTTACGTTAATACGTTTTC
GTCGACTTTTAACGTACCAATGGAAAAACTCAAAACACTAGTTGCAACTGCAGA
AGCTGAACTTGCAAAGAATGTGTCGTTAGACAATGTCTTATCGACTTTTATTTCG
GCAGCTCGGCAAGGGTTTGTTGATTCGGATGTAGAAACTAAAGATGTTGTTGAAT
GTCTTAAATTGTCGCATCAATCGGACATAGAAGTTACTGGCGATTCGTGTAATAA
CTATATGCTCACCTATAACAAAGTTGAAAACATGACACCCCGTGACCTTGGTGCT
TGTATTGACTGTTCGGCGCGTCATATTAATGCGCAGGTAGCAAAATCGCACAACA
TTGCTTTGATATGGAACGTTAAAGATTTCATGTCGTTGTCGGAACAACTACGAAA
ACAAATACGTTCGGCTGCTAAAAAGAATAACTTACCTTTTAAGTTGACATGTGCA
ACTACTAGACAAGTTGTTAATGTTGTAACAACAAAGATAGCACTTAAGGGTGGT
AAAATTGTTAATAATTGGTTGAAGCAGTTAATTAAA
SEQ ID NO: 53 - Clone pCC1-4K-SARS-COV-2-4N-1. Only fragment 3 has been
deoptimized:
GGGTCCCACGTGCTAGCGCTAACATAGGTTGTAACCATACAGGTGTTG
TTGGAGAAGGTTCCGAAGGTCTTAATGACAACCTTCTTGAAATACTCCAAAAAG
AGAAAGTCAACATCAATATTGTTGGTGACTTTAAACTTAATGAAGAGATCGCCAT
TATTTTGGCATCTTTTTCTGCTTCCACAAGTGCTTTTGTGGAAACTGTGAAAGGTT
TGGATTATAAAGCATTCAAACAAATTGTTGAATCCTGTGGTAATTTTAAAGTTAC
AAAAGGAAAAGCTAAAAAAGGTGCCTGGAATATTGGTGAACAGAAATCAATACT
GAGTCCTCTTTATGCATTTGCATCAGAGGCTGCTCGTGTTGTACGATCAATTTTCT
CCCGCACTCTTGAAACTGCTCAAAATTCTGTGCGTGTTTTACAGAAGGCCGCTAT
AACAATACTAGATGGAATTTCACAGTATTCACTGAGACTCATTGATGCTATGATG
TTCACATCTGATTTGGCTACTAACAATCTAGTTGTAATGGCCTACATTACAGGTG
GTGTTGTTCAGTTGACTTCGCAGTGGCTAACTAACATCTTTGGCACTGTTTATGAA
AAACTCAAACCCGTCCTTGATTGGCTTGAAGAGAAGTTTAAGGAAGGTGTAGAG
TTTCTTAGAGACGGTTGGGAAATTGTTAAATTTATCTCAACCTGTGCTTGTGAAAT
TGTCGGTGGACAAATTGTCACCTGTGCAAAGGAAATTAAGGAGAGTGTTCAGAC
ATTCTTTAAGCTTGTAAATAAATTTTTGGCTTTGTGTGCTGACTCTATCATTATTG
GTGGAGCTAAACTTAAAGCCTTGAATTTAGGTGAAACATTTGTCACGCACTCAAA
GGGATTGTACAGAAAGTGTGTTAAATCCAGAGAAGAAACTGGCCTACTCATGCC
TCTAAAAGCCCCAAAAGAAATTATCTTCTTAGAGGGAGAAACACTTCCCACAGA
AGTGTTAACAGAGGAAGTTGTCTTGAAAACTGGTGATTTACAACCATTAGAACA
ACCTACTAGTGAAGCTGTTGAAGCTCCATTGGTTGGTACACCAGTTTGTATTAAC
GGGCTTATGTTGCTCGAAATCAAAGACACAGAAAAGTACTGTGCCCTTGCACCTA
ATATGATGGTAACAAACAATACCTTCACACTCAAAGGCGGTGCACCAACAAAGG
TTACTTTTGGTGATGACACTGTGATAGAAGTGCAAGGTTACAAGAGTGTGAATAT
CACTTTTGAACTTGATGAAAGGATTGATAAAGTACTTAATGAGAAGTGCTCTGCC
TATACAGTTGAACTCGGTACAGAAGTAAATGAGTTCGCCTGTGTTGTGGCAGATG
CTGTCATAAAAACTTTGCAACCAGTATCTGAATTACTTACACCACTGGGCATTGA
TTTAGATGAGTGGAGTATGGCTACATACTACTTATTTGATGAGTCTGGTGAGTTT
AAATTGGCTTCACATATGTATTGTTCTTTCTACCCTCCAGATGAGGATGAAGAAG
AAGGTGATTGTGAAGAAGAAGAGTTTGAGCCATCAACTCAATATGAGTATGGTA
CTGAAGATGATTACCAAGGTAAACCTTTGGAATTTGGTGCCACTTCTGCTGCTCT
TCAACCTGAAGAAGAGCAAGAAGAAGATTGGTTAGATGATGATAGTCAACAAAC
TGTTGGTCAACAAGACGGCAGTGAGGACAATCAGACAACTACTATTCAAACAAT
TGTTGAGGTTCAACCTCAATTAGAGATGGAACTTACACCAGTTGTTCAGACTATT
GAAGTGAATAGTTTTAGTGGTTATTTAAAACTTACTGACAATGTATACATTAAAA
ATGCAGACATTGTGGAAGAAGCTAAAAAGGTAAAACCAACAGTGGTTGTTAATG
CAGCCAATGTTTACCTTAAACATGGAGGAGGTGTTGCAGGAGCCTTAAATAAGG
CTACTAACAATGCCATGCAAGTTGAATCTGATGATTACATAGCTACTAATGGACC
ACTTAAAGTGGGTGGTAGTTGTGTTTTAAGCGGACACAATCTTGCTAAACACTGT
CTTCATGTTGTCGGCCCAAATGTTAACAAAGGTGAAGACATTCAACTTCTTAAGA
GTGCTTATGAAAATTTTAATCAGCACGAAGTTCTACTTGCACCATTATTATCAGCT
GGTATTTTTGGTGCTGACCCTATACATTCTTTAAGAGTTTGTGTAGATACTGTTCG
CACAAATGTCTACTTAGCTGTCTTTGATAAAAATCTCTATGACAAACTTGTTTCAA
GCTTTTTGGAAATGAAGAGTGAAAAGCAAGTTGAACAAAAGATCGCTGAGATTC
CTAAAGAGGAAGTTAAGCCATTTATAACTGAAAGTAAACCTTCAGTTGAACAGA
GAAAACAAGATGATAAGAAAATCAAAGCTTGTGTTGAAGAAGTTACAACAACTC
TGGAAGAAACTAAGTTCCTCACAGAAAACTTGTTACTTTATATTGACATTAATGG
CAATCTTCATCCAGATTCTGCCACTCTTGTTAGTGACATTGACATCACTTTCTTAA
AGAAAGATGCTCCATATATAGTGGGTGATGTTGTTCAAGAGGGTGTTTTAACTGC
TGTGGTTATACCTACTAAAAAGGCTGGTGGCACTACTGAAATGCTAGCGAAAGC
TTTGAGAAAAGTGCCAACAGACAATTATATAACCACTTACCCGGGTCAGGGTTTA
AATGGTTACACTGTAGAGGAGGCAAAGACAGTGCTTAAAAAGTGTAAAAGTGCC
TTTTACATTCTACCATCTATTATCTCTAATGAGAAGCAAGAAATTCTTGGAACTGT
TTCTTGGAATTTGCGAGAAATGCTTGCACATGCAGAAGAAACACGCAAATTAAT
GCCTGTCTGTGTGGAAACTAAAGCCATAGTTTCAACTATACAGCGTAAATATAAG
GGTATTAAAATACAAGAGGGTGTGGTTGATTATGGTGCTAGATTTTACTTTTACA
CCAGTAAAACAACTGTAGCGTCACTTATCAACACACTTAACGATCTAAATGAAA
CTCTTGTTACAATGCCACTTGGCTATGTAACACATGGCTTAAATTTGGAAGAAGC
TGCTCGGTATATGAGATCTCTCAAAGTGCCAGCTACAGTTTCTGTTTCTTCACCTG
ATGCTGTTACAGCGTATAATGGTTATCTTACTTCTTCTTCTAAAACACCTGAAGAA
CATTTTATTGAAACCATCTCACTTGCTGGTTCCTATAAAGATTGGTCCTATTCTGG
ACAATCTACACAACTAGGTATAGAATTTCTTAAGAGAGGTGATAAAAGTGTATAT
TACACTAGTAATCCTACCACATTCCACCTAGATGGTGAAGTTATCACCTTTGACA
ATCTTAAGACACTTCTTTCTTTGAGAGAAGTGAGGACTATTAAGGTGTTTACAAC
AGTAGACAACATTAACCTCCACACGCAAGTTGTGGACATGTCAATGACATATGG
ACAACAGTTTGGTCCAACTTATTTGGATGGAGCTGATGTTACTAAAATAAAACCT
CATAATTCACATGAAGGTAAAACATTTTATGTTTTACCTAATGATGACACTCTAC
GTGTTGAGGCTTTTGAGTACTACCACACAACTGATCCTAGTTTTCTGGGTAGGTA
CATGTCAGCATTAAATCACACTAAAAAGTGGAAATACCCACAAGTTAATGGTTT
AACTTCTATTAAATGGGCAGATAACAACTGTTATCTTGCCACTGCATTGTTAACA
CTCCAACAAATAGAGTTGAAGTTTAATCCACCTGCTCTACAAGATGCTTATTACA
GAGCAAGGGCTGGTGAAGCTGCTAACTTTTGTGCACTTATCTTAGCCTACTGTAA
TAAGACAGTAGGTGAGTTAGGTGATGTTAGAGAAACAATGAGTTACTTGTTTCAA
CATGCCAATTTAGATTCTTGCAAAAGAGTCTTGAACGTGGTGTGTAAAACTTGTG
GACAACAGCAGACAACCCTTAAGGGTGTAGAAGCTGTTATGTACATGGGCACAC
TTTCTTATGAACAATTTAAGAAAGGTGTTCAGATACCTTGTACGTGTGGTAAACA
AGCTACAAAATATCTAGTACAACAGGAGTCACCTTTTGTTATGATGTCAGCACCA
CCTGCTCAGTATGAACTTAAGCATGGTACATTTACTTGTGCTAGTGAGTACACTG
GTAATTACCAGTGTGGTCACTATAAACATATAACTTCTAAAGAAACTTTGTATTG
CATAGACGGTGCTTTACTTACAAAGTCCTCAGAATACAAAGGTCCTATTACGGAT
GTTTTCTACAAAGAAAACAGTTACACAACAACCATAAAACCAGTTACTTATAAAT
TGGATGGTGTTGTTTGTACAGAAATTGACCCTAAGTTGGACAATTATTATAAGAA
AGACAATTCTTATTTCACAGAGCAACCAATTGATCTTGTACCAAACCAACCATAT
CCAAACGCAAGCTTCGATAATTTTAAGTTTGTATGTGATAATATCAAATTTGCTG
ATGATTTAAACCAGTTAACTGGTTATAAGAAACCTGCTTCAAGAGAGCTTAAAGT
TACATTTTTCCCTGACTTAAATGGTGATGTGGTGGCTATTGATTATAAACACTACA
CACCCTCTTTTAAGAAAGGAGCTAAATTGTTACATAAACCTATTGTTTGGCATGT
TAACAATGCAACTAATAAAGCCACGTATAAACCAAATACCTGGTGTATACGTTGT
CTTTGGAGCACAAAACCAGTTGAAACATCAAATTCGTTTGATGTACTGAAGTCAG
AGGACGCGCAGGGAATGGATAATCTTGCCTGCGAAGATCTAAAACCAGTCTCTG
AAGAAGTAGTGGAAAATCCTACCATACAGAAAGACGTTCTTGAGTGTAATGTGA
AAACTACCGAAGTTGTAGGAGACATTATACTTAAACCAGCAAATAATAGTTTAA
AAATTACAGAAGAGGTTGGCCACACAGATCTAATGGCTGCTTATGTAGACAATT
CTAGTCTTACTATTAAGAAACCTAATGAATTATCTAGAGTATTAGGTTTGAAAAC
CCTTGCTACTCATGGTTTAGCTGCTGTTAATAGTGTCCCTTGGGATACTATAGCTA
ATTATGCTAAGCCTTTTCTTAACAAAGTTGTTAGTACAACTACTAACATAGTTAC
ACGGTGTTTAAACCGTGTTTGTACTAATTATATGCCTTATTTCTTTACTTTATTGCT
ACAATTGTGTACTTTTACTAGAAGTACAAATTCTAGAATTAAAGCATCTATGCCG
ACTACTATAGCAAAGAATACTGTTAAGAGTGTCGGTAAATTTTGTCTAGAGGCTT
CATTTAATTATTTGAAGTCACCTAATTTTTCTAAACTGATAAATATTATAATTTGG
TTTTTACTATTAAGTGTTTGCCTAGGTTCTTTAATATACTCAACGGCGGCGTTAGG
TGTTTTAATGTCTAATTTAGGCATGCCGTCTTACTGTACGGGTTACAGAGAAGGC
TATTTGAACTCTACGAATGTCACGATAGCGACGTACTGTACGGGTTCTATACCGT
GTAGTGTTTGTCTTAGTGGTTTAGATTCTTTAGACACGTATCCGTCTTTAGAAACG
ATACAAATAACGATATCATCTTTTAAATGGGATTTAACGGCGTTTGGCTTAGTTG
CGGAGTGGTTTTTGGCGTATATTCTTTTCACGAGGTTTTTCTATGTACTTGGATTG
GCGGCGATAATGCAATTGTTTTTCAGCTATTTTGCGGTACATTTTATAAGTAATTC
TTGGCTTATGTGGTTAATAATAAATCTTGTACAAATGGCGCCGATATCAGCGATG
GTTAGAATGTACATATTCTTTGCGTCATTTTATTATGTATGGAAAAGTTATGTGCA
TGTTGTAGACGGTTGTAATTCATCAACGTGTATGATGTGTTACAAACGTAATAGA
GCGACGAGAGTCGAATGTACGACGATAGTTAATGGTGTTAGAAGGTCCTTTTATG
TCTATGCGAATGGAGGTAAAGGCTTTTGCAAACTACACAATTGGAATTGTGTTAA
TTGTGATACGTTCTGTGCGGGTAGTACGTTTATAAGTGATGAAGTTGCGAGAGAC
TTGTCACTACAGTTTAAAAGACCGATAAATCCGACGGACCAGTCTTCTTACATAG
TTGATAGTGTTACGGTGAAGAATGGTTCCATACATCTTTACTTTGATAAAGCGGG
TCAAAAGACGTATGAAAGACATTCTCTCTCTCATTTTGTTAACTTAGACAACCTG
AGAGCGAATAACACGAAAGGTTCATTGCCGATAAATGTTATAGTTTTTGATGGTA
AATCAAAATGTGAAGAATCATCTGCGAAATCAGCGTCTGTTTACTACAGTCAGCT
TATGTGTCAACCGATACTGTTACTAGATCAGGCGTTAGTGTCTGATGTTGGTGAT
AGTGCGGAAGTTGCGGTTAAAATGTTTGATGCGTACGTTAATACGTTTTCATCAA
CGTTTAACGTACCGATGGAAAAACTCAAAACGCTAGTTGCGACGGCGGAAGCGG
AACTTGCGAAGAATGTGTCCTTAGACAATGTCTTATCTACGTTTATATCAGCGGC
GCGGCAAGGGTTTGTTGATTCAGATGTAGAAACGAAAGATGTTGTTGAATGTCTT
AAATTGTCACATCAATCTGACATAGAAGTTACGGGCGATAGTTGTAATAACTATA
TGCTCACGTATAACAAAGTTGAAAACATGACGCCGCGTGACCTTGGTGCGTGTAT
AGACTGTAGTGCGCGTCATATAAATGCGCAGGTAGCGAAAAGTCACAACATAGC
GTTGATATGGAACGTTAAAGATTTCATGTCATTGTCTGAACAACTACGAAAACAA
ATACGTAGTGCGGCGAAAAAGAATAACTTACCGTTTAAGTTGACGTGTGCGACG
ACGAGACAAGTTGTTAATGTTGTAACGACGAAGATAGCGCTTAAGGGTGGTAAA
ATAGTTAATAATTGGTTGAAGCAGTTAATTAAA
SEQ ID NO: 54 - Clone pCC1-4K-SARS-COV-2-4N-2. Only fragment 2 has been
deoptimized.
SEQ ID NO: 55 - Clone pCC1-4K-SARS-COV-2-4N-3. Only fragment 1 has been
deoptimized.
SEQ ID NO: 56 - Clone pCC1-4K-SARS-COV-2-4N-4. Only fragments 1 and 2
have been deoptimized.
SEQ ID NO: 57 - Clone pCC1-4K-SARS-COV-2-4N-5. Only fragments 1 and 3
have been deoptimized.
SEQ ID NO: 58 - Clone pCC1-4K-SARS-COV-2-4N-6. Only fragments 2 and 3
have been deoptimized.
SEQ ID NO: 59 - Clone pCC1-4K-SARS-COV-2-4N-7. All 3 fragments were
deoptimized. Deoptimized sequence between SanDI to PacI in ORF1a:
GGGTCCCACGTGCGAGCGCGAACATAGGTTGTAACCATACGGGTGTT
GTTGGAGAAGGTTCCGAAGGTCTTAATGACAACCTTCTTGAAATACTCCAAAAA
GAGAAAGTCAACATAAATATAGTTGGTGACTTTAAACTTAATGAAGAGATAGCG
ATAATATTGGCGTCTTTTTCTGCGTCCACGAGTGCGTTTGTGGAAACGGTGAAAG
GTTTGGATTATAAAGCGTTCAAACAAATTGTTGAATCCTGTGGTAATTTTAAAGT
TACGAAAGGAAAAGCGAAAAAAGGTGCGTGGAATATAGGTGAACAGAAATCAA
TACTGAGTCCGCTTTATGCGTTTGCGTCAGAGGCGGCGCGTGTTGTACGATCAAT
ATTCTCCCGCACGCTTGAAACGGCGCAAAATTCTGTGCGTGTTTTACAGAAGGCG
GCGATAACGATACTAGATGGAATATCACAGTATTCACTGAGACTCATAGATGCG
ATGATGTTCACGTCTGATTTGGCGACGAACAATCTAGTTGTAATGGCGTACATAA
CGGGTGGTGTTGTTCAGTTGACGTCGCAGTGGCTAACGAACATATTTGGCACGGT
TTATGAAAAACTCAAACCGGTCCTTGATTGGCTTGAAGAGAAGTTTAAGGAAGG
TGTAGAGTTTCTTAGAGACGGTTGGGAAATAGTTAAATTTATATCAACGTGTGCG
TGTGAAATAGTCGGTGGACAAATAGTCACGTGTGCGAAGGAAATAAAGGAGAGT
GTTCAGACGTTCTTTAAGCTTGTAAATAAATTTTTGGCGTTGTGTGCGGACTCTAT
AATAATAGGTGGAGCGAAACTTAAAGCGTTGAATTTAGGTGAAACGTTTGTCAC
GCACTCAAAGGGATTGTACAGAAAGTGTGTTAAATCCAGAGAAGAAACGGGCCT
ACTCATGCCGCTAAAAGCGCCGAAAGAAATAATATTCTTAGAGGGAGAAACGCT
TCCGACGGAAGTGTTAACGGAGGAAGTTGTCTTGAAAACGGGTGATTTACAACC
GTTAGAACAACCGACGAGTGAAGCGGTTGAAGCGCCGTTGGTTGGTACGCCGGT
TTGTATAAACGGGCTTATGTTGCTCGAAATAAAAGACACGGAAAAGTACTGTGC
GCTTGCGCCGAATATGATGGTAACGAACAATACGTTCACGCTCAAAGGCGGTGC
GCCGACAAAGGTTACGTTTGGTGATGACACGGTGATAGAAGTGCAAGGTTACAA
GAGTGTGAATATAACGTTTGAACTTGATGAAAGGATAGATAAAGTACTTAATGA
GAAGTGCTCTGCGTATACGGTTGAACTCGGTACGGAAGTAAATGAGTTCGCGTGT
GTTGTGGCGGATGCGGTCATAAAAACGTTGCAACCGGTATCTGAATTACTTACGC
CGCTGGGCATAGATTTAGATGAGTGGAGTATGGCGACGTACTACTTATTTGATGA
GTCTGGTGAGTTTAAATTGGCGTCACATATGTATTGTTCTTTCTACCCGCCGGATG
AGGATGAAGAAGAAGGTGATTGTGAAGAAGAAGAGTTTGAGCCGTCAACGCAAT
ATGAGTATGGTACGGAAGATGATTACCAAGGTAAACCGTTGGAATTTGGTGCGA
CGTCTGCGGCGCTTCAACCGGAAGAAGAGCAAGAAGAAGATTGGTTAGATGATG
ATAGTCAACAAACGGTTGGTCAACAAGACGGCAGTGAGGACAATCAGACGACG
ACGATTCAAACGATAGTTGAGGTTCAACCGCAATTAGAGATGGAACTTACGCCG
GTTGTTCAGACGATAGAAGTGAATAGTTTTAGTGGTTATTTAAAACTTACGGACA
ATGTATACATAAAAAATGCGGACATAGTGGAAGAAGCGAAAAAGGTAAAACCG
ACGGTGGTTGTTAATGCGGCGAATGTTTACCTTAAACATGGAGGAGGTGTTGCGG
GAGCGTTAAATAAGGCGACGAACAATGCGATGCAAGTTGAATCTGATGATTACA
TAGCGACGAATGGACCGCTTAAAGTGGGTGGTAGTTGTGTTTTAAGCGGACACA
ATCTTGCGAAACACTGTCTTCATGTTGTCGGCCCGAATGTTAACAAAGGTGAAGA
CATACAACTTCTTAAGAGTGCGTATGAAAATTTTAATCAGCACGAAGTTCTACTT
GCGCCGTTATTATCAGCGGGTATATTTGGTGCGGACCCGATACATTCTTTAAGAG
TTTGTGTAGATACGGTTCGCACGAATGTCTACTTAGCGGTCTTTGATAAAAATCT
CTATGACAAACTTGTTTCAAGCTTTTTGGAAATGAAGAGTGAAAAGCAAGTTGAA
CAAAAGATAGCGGAGATACCGAAAGAGGAAGTTAAGCCGTTTATAACGGAAAG
TAAACCGTCAGTTGAACAGAGAAAACAAGATGATAAGAAAATAAAAGCGTGTGT
TGAAGAAGTTACGACGACGCTGGAAGAAACGAAGTTCCTCACGGAAAACTTGTT
ACTTTATATAGACATAAATGGCAATCTTCATCCGGATTCTGCGACGCTTGTTAGT
GACATAGACATAACGTTCTTAAAGAAAGATGCGCCGTATATAGTGGGTGATGTT
GTTCAAGAGGGTGTTTTAACGGCGGTGGTTATACCGACGAAAAAGGCGGGTGGC
ACGACGGAAATGCTAGCGAAAGCGTTGAGAAAAGTGCCGACGGACAATTATATA
ACGACGTACCCGGGTCAGGGTTTAAATGGTTACACGGTAGAGGAGGCGAAGACG
GTGCTTAAAAAGTGTAAAAGTGCGTTTTACATACTACCGTCTATAATATCTAATG
AGAAGCAAGAAATACTTGGAACGGTTTCTTGGAATTTGCGAGAAATGCTTGCGC
ATGCGGAAGAAACGCGCAAATTAATGCCGGTCTGTGTGGAAACGAAAGCGATAG
TTTCAACGATACAGCGTAAATATAAGGGTATAAAAATACAAGAGGGTGTGGTTG
ATTATGGTGCGAGATTTTACTTTTACACGAGTAAAACGACGGTAGCGTCACTTAT
AAACACGCTTAACGATCTAAATGAAACGCTTGTTACGATGCCGCTTGGCTATGTA
ACGCATGGCTTAAATTTGGAAGAAGCGGCGCGGTATATGAGATCTCTCAAAGTG
CCGGCGACGGTTTCTGTTTCTTCACCGGATGCGGTTACGGCGTATAATGGTTATC
TTACGTCTTCTTCTAAAACGCCGGAAGAACATTTTATTGAAACGATATCACTTGC
GGGTTCCTATAAAGATTGGTCCTATTCTGGACAATCTACGCAACTAGGTATAGAA
TTTCTTAAGAGAGGTGATAAAAGTGTATATTACACGAGTAATCCGACGACGTTCC
ACCTAGATGGTGAAGTTATAACGTTTGACAATCTTAAGACGCTTCTTTCTTTGAG
AGAAGTGAGGACGATAAAGGTGTTTACGACGGTAGACAACATAAACCTCCACAC
GCAAGTTGTGGACATGTCAATGACGTATGGACAACAGTTTGGTCCGACGTATTTG
GATGGAGCGGATGTTACGAAAATAAAACCGCATAATTCACATGAAGGTAAAACG
TTTTATGTTTTACCGAATGATGACACGCTACGTGTTGAGGCGTTTGAGTACTACC
ACACGACGGATCCGAGTTTTCTGGGTAGGTACATGTCAGCGTTAAATCACACGA
AAAAGTGGAAATACCCGCAAGTTAATGGTTTAACGTCTATAAAATGGGCGGATA
ACAACTGTTATCTTGCGACGGCGTTGTTAACGCTCCAACAAATAGAGTTGAAGTT
TAATCCGCCGGCGCTACAAGATGCGTATTACAGAGCGAGGGCGGGTGAAGCGGC
GAACTTTTGTGCGCTTATATTAGCGTACTGTAATAAGACGGTAGGTGAGTTAGGT
GATGTTAGAGAAACGATGAGTTACTTGTTTCAACATGCGAATTTAGATTCTTGCA
AAAGAGTCTTGAACGTGGTGTGTAAAACGTGTGGACAACAGCAGACGACGCTTA
AGGGTGTAGAAGCGGTTATGTACATGGGCACGCTTTCTTATGAACAATTTAAGAA
AGGTGTTCAGATACCGTGTACGTGTGGTAAACAAGCGACGAAATATCTAGTACA
ACAGGAGTCACCGTTTGTTATGATGTCAGCGCCGCCGGCGCAGTATGAACTTAAG
CATGGTACGTTTACGTGTGCGAGTGAGTACACGGGTAATTACCAGTGTGGTCACT
ATAAACATATAACGTCTAAAGAAACGTTGTATTGCATAGACGGTGCGTTACTTAC
GAAGTCCTCAGAATACAAAGGTCCGATAACGGATGTTTTCTACAAAGAAAACAG
TTACACGACGACGATAAAACCGGTTACGTATAAATTGGATGGTGTTGTTTGTACG
GAAATAGACCCGAAGTTGGACAATTATTATAAGAAAGACAATTCTTATTTCACGG
AGCAACCGATAGATCTTGTACCGAACCAACCGTATCCGAACGCGAGCTTCGATA
ATTTTAAGTTTGTATGTGATAATATAAAATTTGCGGATGATTTAAACCAGTTAAC
GGGTTATAAGAAACCGGCGTCAAGAGAGCTTAAAGTTACGTTTTTCCCGGACTTA
AATGGTGATGTGGTGGCGATAGATTATAAACACTACACGCCGTCTTTTAAGAAAG
GAGCGAAATTGTTACATAAACCGATAGTTTGGCATGTTAACAATGCGACGAATA
AAGCGACGTATAAACCGAATACGTGGTGTATACGTTGTCTTTGGAGCACGAAAC
CGGTTGAAACGTCAAATTCGTTTGATGTACTGAAGTCAGAGGACGCGCAGGGAA
TGGATAATCTTGCGTGCGAAGATCTAAAACCGGTCTCTGAAGAAGTAGTGGAAA
ATCCGACGATACAGAAAGACGTTCTTGAGTGTAATGTGAAAACGACGGAAGTTG
TAGGAGACATAATACTTAAACCGGCGAATAATAGTTTAAAAATAACGGAAGAGG
TTGGCCACACGGATCTAATGGCGGCGTATGTAGACAATTCTAGTCTTACGATAAA
GAAACCGAATGAATTATCTAGAGTATTAGGTTTGAAAACGCTTGCGACGCATGGT
TTAGCGGCGGTTAATAGTGTCCCGTGGGATACGATAGCGAATTATGCGAAGCCG
TTTCTTAACAAAGTTGTTAGTACGACGACGAACATAGTTACGCGGTGTTTAAACC
GTGTTTGTACGAATTATATGCCGTATTTCTTTACGTTATTGCTACAATTGTGTACG
TTTACGAGAAGTACGAATTCTAGAATAAAAGCGTCTATGCCGACGACGATAGCG
AAGAATACGGTTAAGAGTGTCGGTAAATTTTGTCTAGAGGCGTCATTTAATTATT
TGAAGTCACCGAATTTTTCTAAACTGATAAATATAATAATATGGTTTTTACTATTA
AGTGTTTGCCTAGGTTCTTTAATATACTCAACGGCGGCGTTAGGTGTTTTAATGTC
TAATTTAGGCATGCCGTCTTACTGTACGGGTTACAGAGAAGGCTATTTGAACTCT
ACGAATGTCACGATAGCGACGTACTGTACGGGTTCTATACCGTGTAGTGTTTGTC
TTAGTGGTTTAGATTCTTTAGACACGTATCCGTCTTTAGAAACGATACAAATAAC
GATATCATCTTTTAAATGGGATTTAACGGCGTTTGGCTTAGTTGCGGAGTGGTTTT
TGGCGTATATTCTTTTCACGAGGTTTTTCTATGTACTTGGATTGGCGGCGATAATG
CAATTGTTTTTCAGCTATTTTGCGGTACATTTTATAAGTAATTCTTGGCTTATGTG
GTTAATAATAAATCTTGTACAAATGGCGCCGATATCAGCGATGGTTAGAATGTAC
ATATTCTTTGCGTCATTTTATTATGTATGGAAAAGTTATGTGCATGTTGTAGACGG
TTGTAATTCATCAACGTGTATGATGTGTTACAAACGTAATAGAGCGACGAGAGTC
GAATGTACGACGATAGTTAATGGTGTTAGAAGGTCCTTTTATGTCTATGCGAATG
GAGGTAAAGGCTTTTGCAAACTACACAATTGGAATTGTGTTAATTGTGATACGTT
CTGTGCGGGTAGTACGTTTATAAGTGATGAAGTTGCGAGAGACTTGTCACTACAG
TTTAAAAGACCGATAAATCCGACGGACCAGTCTTCTTACATAGTTGATAGTGTTA
CGGTGAAGAATGGTTCCATACATCTTTACTTTGATAAAGCGGGTCAAAAGACGTA
TGAAAGACATTCTCTCTCTCATTTTGTTAACTTAGACAACCTGAGAGCGAATAAC
ACGAAAGGTTCATTGCCGATAAATGTTATAGTTTTTGATGGTAAATCAAAATGTG
AAGAATCATCTGCGAAATCAGCGTCTGTTTACTACAGTCAGCTTATGTGTCAACC
GATACTGTTACTAGATCAGGCGTTAGTGTCTGATGTTGGTGATAGTGCGGAAGTT
GCGGTTAAAATGTTTGATGCGTACGTTAATACGTTTTCATCAACGTTTAACGTAC
CGATGGAAAAACTCAAAACGCTAGTTGCGACGGCGGAAGCGGAACTTGCGAAG
AATGTGTCCTTAGACAATGTCTTATCTACGTTTATATCAGCGGCGCGGCAAGGGT
TTGTTGATTCAGATGTAGAAACGAAAGATGTTGTTGAATGTCTTAAATTGTCACA
TCAATCTGACATAGAAGTTACGGGCGATAGTTGTAATAACTATATGCTCACGTAT
AACAAAGTTGAAAACATGACGCCGCGTGACCTTGGTGCGTGTATAGACTGTAGT
GCGCGTCATATAAATGCGCAGGTAGCGAAAAGTCACAACATAGCGTTGATATGG
AACGTTAAAGATTTCATGTCATTGTCTGAACAACTACGAAAACAAATACGTAGTG
CGGCGAAAAAGAATAACTTACCGTTTAAGTTGACGTGTGCGACGACGAGACAAG
TTGTTAATGTTGTAACGACGAAGATAGCGCTTAAGGGTGGTAAAATAGTTAATAA
TTGGTTGAAGCAGTTAATTAAA
SEQ ID NO: 60 - Clone pCC1-4K-SARS-COV-2-7N-1. Only fragment 3 has been
deoptimized:
GGGTCCCACGTGCTAGCGCTAACATAGGTTGTAACCATACAGGTGTTG
TTGGAGAAGGTTCCGAAGGTCTTAATGACAACCTTCTTGAAATACTCCAAAAAG
AGAAAGTCAACATCAATATTGTTGGTGACTTTAAACTTAATGAAGAGATCGCCAT
TATTTTGGCATCTTTTTCTGCTTCCACAAGTGCTTTTGTGGAAACTGTGAAAGGTT
TGGATTATAAAGCATTCAAACAAATTGTTGAATCCTGTGGTAATTTTAAAGTTAC
AAAAGGAAAAGCTAAAAAAGGTGCCTGGAATATTGGTGAACAGAAATCAATACT
GAGTCCTCTTTATGCATTTGCATCAGAGGCTGCTCGTGTTGTACGATCAATTTTCT
CCCGCACTCTTGAAACTGCTCAAAATTCTGTGCGTGTTTTACAGAAGGCCGCTAT
AACAATACTAGATGGAATTTCACAGTATTCACTGAGACTCATTGATGCTATGATG
TTCACATCTGATTTGGCTACTAACAATCTAGTTGTAATGGCCTACATTACAGGTG
GTGTTGTTCAGTTGACTTCGCAGTGGCTAACTAACATCTTTGGCACTGTTTATGAA
AAACTCAAACCCGTCCTTGATTGGCTTGAAGAGAAGTTTAAGGAAGGTGTAGAG
TTTCTTAGAGACGGTTGGGAAATTGTTAAATTTATCTCAACCTGTGCTTGTGAAAT
TGTCGGTGGACAAATTGTCACCTGTGCAAAGGAAATTAAGGAGAGTGTTCAGAC
ATTCTTTAAGCTTGTAAATAAATTTTTGGCTTTGTGTGCTGACTCTATCATTATTG
GTGGAGCTAAACTTAAAGCCTTGAATTTAGGTGAAACATTTGTCACGCACTCAAA
GGGATTGTACAGAAAGTGTGTTAAATCCAGAGAAGAAACTGGCCTACTCATGCC
TCTAAAAGCCCCAAAAGAAATTATCTTCTTAGAGGGAGAAACACTTCCCACAGA
AGTGTTAACAGAGGAAGTTGTCTTGAAAACTGGTGATTTACAACCATTAGAACA
ACCTACTAGTGAAGCTGTTGAAGCTCCATTGGTTGGTACACCAGTTTGTATTAAC
GGGCTTATGTTGCTCGAAATCAAAGACACAGAAAAGTACTGTGCCCTTGCACCTA
ATATGATGGTAACAAACAATACCTTCACACTCAAAGGCGGTGCACCAACAAAGG
TTACTTTTGGTGATGACACTGTGATAGAAGTGCAAGGTTACAAGAGTGTGAATAT
CACTTTTGAACTTGATGAAAGGATTGATAAAGTACTTAATGAGAAGTGCTCTGCC
TATACAGTTGAACTCGGTACAGAAGTAAATGAGTTCGCCTGTGTTGTGGCAGATG
CTGTCATAAAAACTTTGCAACCAGTATCTGAATTACTTACACCACTGGGCATTGA
TTTAGATGAGTGGAGTATGGCTACATACTACTTATTTGATGAGTCTGGTGAGTTT
AAATTGGCTTCACATATGTATTGTTCTTTCTACCCTCCAGATGAGGATGAAGAAG
AAGGTGATTGTGAAGAAGAAGAGTTTGAGCCATCAACTCAATATGAGTATGGTA
CTGAAGATGATTACCAAGGTAAACCTTTGGAATTTGGTGCCACTTCTGCTGCTCT
TCAACCTGAAGAAGAGCAAGAAGAAGATTGGTTAGATGATGATAGTCAACAAAC
TGTTGGTCAACAAGACGGCAGTGAGGACAATCAGACAACTACTATTCAAACAAT
TGTTGAGGTTCAACCTCAATTAGAGATGGAACTTACACCAGTTGTTCAGACTATT
GAAGTGAATAGTTTTAGTGGTTATTTAAAACTTACTGACAATGTATACATTAAAA
ATGCAGACATTGTGGAAGAAGCTAAAAAGGTAAAACCAACAGTGGTTGTTAATG
CAGCCAATGTTTACCTTAAACATGGAGGAGGTGTTGCAGGAGCCTTAAATAAGG
CTACTAACAATGCCATGCAAGTTGAATCTGATGATTACATAGCTACTAATGGACC
ACTTAAAGTGGGTGGTAGTTGTGTTTTAAGCGGACACAATCTTGCTAAACACTGT
CTTCATGTTGTCGGCCCAAATGTTAACAAAGGTGAAGACATTCAACTTCTTAAGA
GTGCTTATGAAAATTTTAATCAGCACGAAGTTCTACTTGCACCATTATTATCAGCT
GGTATTTTTGGTGCTGACCCTATACATTCTTTAAGAGTTTGTGTAGATACTGTTCG
CACAAATGTCTACTTAGCTGTCTTTGATAAAAATCTCTATGACAAACTTGTTTCAA
GCTTTTTGGAAATGAAGAGTGAAAAGCAAGTTGAACAAAAGATCGCTGAGATTC
CTAAAGAGGAAGTTAAGCCATTTATAACTGAAAGTAAACCTTCAGTTGAACAGA
GAAAACAAGATGATAAGAAAATCAAAGCTTGTGTTGAAGAAGTTACAACAACTC
TGGAAGAAACTAAGTTCCTCACAGAAAACTTGTTACTTTATATTGACATTAATGG
CAATCTTCATCCAGATTCTGCCACTCTTGTTAGTGACATTGACATCACTTTCTTAA
AGAAAGATGCTCCATATATAGTGGGTGATGTTGTTCAAGAGGGTGTTTTAACTGC
TGTGGTTATACCTACTAAAAAGGCTGGTGGCACTACTGAAATGCTAGCGAAAGC
TTTGAGAAAAGTGCCAACAGACAATTATATAACCACTTACCCGGGTCAGGGTTTA
AATGGTTACACTGTAGAGGAGGCAAAGACAGTGCTTAAAAAGTGTAAAAGTGCC
TTTTACATTCTACCATCTATTATCTCTAATGAGAAGCAAGAAATTCTTGGAACTGT
TTCTTGGAATTTGCGAGAAATGCTTGCACATGCAGAAGAAACACGCAAATTAAT
GCCTGTCTGTGTGGAAACTAAAGCCATAGTTTCAACTATACAGCGTAAATATAAG
GGTATTAAAATACAAGAGGGTGTGGTTGATTATGGTGCTAGATTTTACTTTTACA
CCAGTAAAACAACTGTAGCGTCACTTATCAACACACTTAACGATCTAAATGAAA
CTCTTGTTACAATGCCACTTGGCTATGTAACACATGGCTTAAATTTGGAAGAAGC
TGCTCGGTATATGAGATCTCTCAAAGTGCCAGCTACAGTTTCTGTTTCTTCACCTG
ATGCTGTTACAGCGTATAATGGTTATCTTACTTCTTCTTCTAAAACACCTGAAGAA
CATTTTATTGAAACCATCTCACTTGCTGGTTCCTATAAAGATTGGTCCTATTCTGG
ACAATCTACACAACTAGGTATAGAATTTCTTAAGAGAGGTGATAAAAGTGTATAT
TACACTAGTAATCCTACCACATTCCACCTAGATGGTGAAGTTATCACCTTTGACA
ATCTTAAGACACTTCTTTCTTTGAGAGAAGTGAGGACTATTAAGGTGTTTACAAC
AGTAGACAACATTAACCTCCACACGCAAGTTGTGGACATGTCAATGACATATGG
ACAACAGTTTGGTCCAACTTATTTGGATGGAGCTGATGTTACTAAAATAAAACCT
CATAATTCACATGAAGGTAAAACATTTTATGTTTTACCTAATGATGACACTCTAC
GTGTTGAGGCTTTTGAGTACTACCACACAACTGATCCTAGTTTTCTGGGTAGGTA
CATGTCAGCATTAAATCACACTAAAAAGTGGAAATACCCACAAGTTAATGGTTT
AACTTCTATTAAATGGGCAGATAACAACTGTTATCTTGCCACTGCATTGTTAACA
CTCCAACAAATAGAGTTGAAGTTTAATCCACCTGCTCTACAAGATGCTTATTACA
GAGCAAGGGCTGGTGAAGCTGCTAACTTTTGTGCACTTATCTTAGCCTACTGTAA
TAAGACAGTAGGTGAGTTAGGTGATGTTAGAGAAACAATGAGTTACTTGTTTCAA
CATGCCAATTTAGATTCTTGCAAAAGAGTCTTGAACGTGGTGTGTAAAACTTGTG
GACAACAGCAGACAACCCTTAAGGGTGTAGAAGCTGTTATGTACATGGGCACAC
TTTCTTATGAACAATTTAAGAAAGGTGTTCAGATACCTTGTACGTGTGGTAAACA
AGCTACAAAATATCTAGTACAACAGGAGTCACCTTTTGTTATGATGTCAGCACCA
CCTGCTCAGTATGAACTTAAGCATGGTACATTTACTTGTGCTAGTGAGTACACTG
GTAATTACCAGTGTGGTCACTATAAACATATAACTTCTAAAGAAACTTTGTATTG
CATAGACGGTGCTTTACTTACAAAGTCCTCAGAATACAAAGGTCCTATTACGGAT
GTTTTCTACAAAGAAAACAGTTACACAACAACCATAAAACCAGTTACTTATAAAT
TGGATGGTGTTGTTTGTACAGAAATTGACCCTAAGTTGGACAATTATTATAAGAA
AGACAATTCTTATTTCACAGAGCAACCAATTGATCTTGTACCAAACCAACCATAT
CCAAACGCAAGCTTCGATAATTTTAAGTTTGTATGTGATAATATCAAATTTGCTG
ATGATTTAAACCAGTTAACTGGTTATAAGAAACCTGCTTCAAGAGAGCTTAAAGT
TACATTTTTCCCTGACTTAAATGGTGATGTGGTGGCTATTGATTATAAACACTACA
CACCCTCTTTTAAGAAAGGAGCTAAATTGTTACATAAACCTATTGTTTGGCATGT
TAACAATGCAACTAATAAAGCCACGTATAAACCAAATACCTGGTGTATACGTTGT
CTTTGGAGCACAAAACCAGTTGAAACATCAAATTCGTTTGATGTACTGAAGTCAG
AGGACGCGCAGGGAATGGATAATCTTGCCTGCGAAGATCTAAAACCAGTCTCTG
AAGAAGTAGTGGAAAATCCTACCATACAGAAAGACGTTCTTGAGTGTAATGTGA
AAACTACCGAAGTTGTAGGAGACATTATACTTAAACCAGCAAATAATAGTTTAA
AAATTACAGAAGAGGTTGGCCACACAGATCTAATGGCTGCTTATGTAGACAATT
CTAGTCTTACTATTAAGAAACCTAATGAATTATCTAGAGTATTAGGTTTGAAAAC
CCTTGCTACTCATGGTTTAGCTGCTGTTAATAGTGTCCCTTGGGATACTATAGCTA
ATTATGCTAAGCCTTTTCTTAACAAAGTTGTTAGTACAACTACTAACATAGTTAC
ACGGTGTTTAAACCGTGTTTGTACTAATTATATGCCTTATTTCTTTACTTTATTGCT
ACAATTGTGTACTTTTACTAGAAGTACAAATTCTAGAATTAAAGCATCTATGCCG
ACTACTATAGCAAAGAATACTGTTAAGAGTGTCGGTAAATTTTGTCTAGAGGCTT
CATTTAATTATTTGAAGTCACCTAATTTTTCTAAACTGATAAATATTATAATTTGG
TTTTTACTATTAAGTGTTTGCCTAGGTTCTTTAATCTACTCAACCGCGGCGTTAGG
TGTTTTAATGTCTAATTTAGGTATGCCGTCTTACTGTACGGGTTACCGTGAAGGTT
ATTTGAACTCTACGAATGTCACGATTGCGACGTACTGTACGGGTTCTATACCGTG
TAGTGTTTGTCTTAGTGGTTTAGATTCTTTAGACACGTATCCGTCTTTAGAAACGA
TACAAATTACGATTTCATCTTTTAAATGGGATTTAACGGCGTTTGGTTTAGTTGCG
GAGTGGTTTTTGGCGTATATTCTTTTCACGCGTTTTTTCTATGTACTTGGTTTGGCG
GCGATCATGCAATTGTTTTTCAGCTATTTTGCGGTACATTTTATTAGTAATTCTTG
GCTTATGTGGTTAATAATTAATCTTGTACAAATGGCGCCGATTTCAGCGATGGTT
AGAATGTACATCTTCTTTGCGTCATTTTATTATGTATGGAAAAGTTATGTGCATGT
TGTAGACGGTTGTAATTCATCAACGTGTATGATGTGTTACAAACGTAATAGAGCG
ACGCGTGTCGAATGTACGACGATTGTTAATGGTGTTAGACGTTCCTTTTATGTCTA
TGCGAATGGTGGTAAAGGTTTTTGCAAACTACACAATTGGAATTGTGTTAATTGT
GATACGTTCTGTGCGGGTAGTACGTTTATTAGTGATGAAGTTGCGCGTGACTTGT
CACTACAGTTTAAACGTCCGATAAATCCGACGGACCAGTCTTCTTACATCGTTGA
TAGTGTTACGGTGAAGAATGGTTCCATCCATCTTTACTTTGATAAAGCGGGTCAA
AAGACGTATGAACGTCATTCTCTCTCTCATTTTGTTAACTTAGACAACCTGCGTGC
GAATAACACGAAAGGTTCATTGCCGATTAATGTTATAGTTTTTGATGGTAAATCA
AAATGTGAAGAATCATCTGCGAAATCAGCGTCTGTTTACTACAGTCAGCTTATGT
GTCAACCGATACTGTTACTAGATCAGGCGTTAGTGTCTGATGTTGGTGATAGTGC
GGAAGTTGCGGTTAAAATGTTTGATGCGTACGTTAATACGTTTTCATCAACGTTT
AACGTACCGATGGAAAAACTCAAAACGCTAGTTGCGACGGCGGAAGCGGAACTT
GCGAAGAATGTGTCCTTAGACAATGTCTTATCTACGTTTATTTCAGCGGCGCGTC
AAGGTTTTGTTGATTCAGATGTAGAAACGAAAGATGTTGTTGAATGTCTTAAATT
GTCACATCAATCTGACATAGAAGTTACGGGTGATAGTTGTAATAACTATATGCTC
ACGTATAACAAAGTTGAAAACATGACGCCGCGTGACCTTGGTGCGTGTATTGACT
GTAGTGCGCGTCATATTAATGCGCAGGTAGCGAAAAGTCACAACATTGCGTTGA
TATGGAACGTTAAAGATTTCATGTCATTGTCTGAACAACTACGTAAACAAATACG
TAGTGCGGCGAAAAAGAATAACTTACCGTTTAAGTTGACGTGTGCGACGACGCG
TCAAGTTGTTAATGTTGTAACGACGAAGATAGCGCTTAAGGGTGGTAAAATTGTT
AATAATTGGTTGAAGCAATTAATTAAA
SEQ ID NO: 61 - Clone pCC1-4K-SARS-COV-2-7N-2. Only fragment 2 has been
deoptimized.
SEQ ID NO: 62 - Clone pCC1-4K-SARS-COV-2-7N-3. Only fragment 1 has been
deoptimized.
SEQ ID NO: 63 - Clone pCC1-4K-SARS-COV-2-7N-4. Only fragments 1 and 2
have been deoptimized.
SEQ ID NO: 64 - Clone pCC1-4K-SARS-COV-2-7N-5. Only fragments 1 and 3
have been deoptimized.
SEQ ID NO: 65 - Clone pCC1-4K-SARS-COV-2-7N-6. Only fragments 2 and 3
have been deoptimized.
SEQ ID NO: 66 - Clone pCC1-4K-SARS-COV-2-7N-7. All 3 fragments were
deoptimized. Deoptimized sequence between SanDI to PacI in ORF1a:
GGGTCCCGCGTGCGAGCGCGAACATAGGTTGTAACCATACGGGTGTT
GTTGGTGAAGGTTCCGAAGGTCTTAATGACAACCTTCTTGAAATACTCCAAAAAG
AGAAAGTCAACATAAATATAGTTGGTGACTTTAAACTTAATGAAGAGATAGCGA
TAATATTGGCGTCTTTTTCTGCGTCCACGAGTGCGTTTGTGGAAACAGTGAAAGG
TTTGGATTATAAAGCGTTCAAACAAATAGTTGAATCCTGTGGTAATTTTAAAGTT
ACGAAAGGTAAAGCGAAAAAAGGTGCGTGGAATATAGGTGAACAAAAATCAAT
ACTGAGTCCGCTTTATGCGTTTGCGTCAGAGGCGGCGCGTGTTGTACGTTCAATA
TTCTCCCGTACGCTTGAAACGGCGCAAAATTCTGTGCGTGTTTTACAAAAGGCGG
CGATAACGATACTAGATGGTATATCACAATATTCACTGCGTCTCATAGATGCGAT
GATGTTCACGTCTGATTTGGCGACGAACAATCTAGTTGTAATGGCGTACATAACG
GGTGGTGTTGTTCAATTGACGTCGCAATGGCTAACGAACATATTTGGTACGGTTT
ATGAAAAACTCAAACCGGTCCTTGATTGGCTTGAAGAGAAGTTTAAGGAAGGTG
TAGAGTTTCTTCGTGACGGTTGGGAAATAGTTAAATTTATATCAACGTGTGCGTG
TGAAATAGTCGGTGGTCAAATAGTCACGTGTGCGAAGGAAATAAAGGAGAGTGT
TCAAACGTTCTTTAAGCTTGTAAATAAATTTTTGGCGTTGTGTGCGGACTCTATAA
TAATAGGTGGTGCGAAACTTAAAGCGTTGAATTTAGGTGAAACGTTTGTCACGCA
CTCAAAGGGTTTGTACCGTAAGTGTGTTAAATCCCGTGAAGAAACGGGTCTACTC
ATGCCGCTAAAAGCGCCGAAAGAAATAATATTCTTAGAGGGTGAAACGCTTCCG
ACGGAAGTGTTAACGGAGGAAGTTGTCTTGAAAACGGGTGATTTACAACCGTTA
GAACAACCGACGAGTGAAGCGGTTGAAGCGCCGTTGGTTGGTACGCCGGTTTGT
ATAAACGGTCTTATGTTGCTCGAAATAAAAGACACGGAAAAGTACTGTGCGCTT
GCGCCGAATATGATGGTAACGAACAATACGTTCACGCTCAAAGGTGGTGCGCCG
ACGAAGGTTACGTTTGGTGATGACACGGTGATAGAAGTGCAAGGTTACAAGAGT
GTGAATATAACGTTTGAACTTGATGAACGTATAGATAAAGTACTTAATGAGAAGT
GCTCTGCGTATACGGTTGAACTCGGTACGGAAGTAAATGAGTTCGCGTGTGTTGT
GGCGGATGCGGTCATAAAAACGTTGCAACCGGTATCTGAATTACTTACGCCGCTG
GGTATAGATTTAGATGAGTGGAGTATGGCGACGTACTACTTATTTGATGAGTCTG
GTGAGTTTAAATTGGCGTCACATATGTATTGTTCTTTCTACCCGCCGGATGAGGA
TGAAGAAGAAGGTGATTGTGAAGAAGAAGAGTTTGAGCCGTCAACGCAATATGA
GTATGGTACGGAAGATGATTACCAAGGTAAACCGTTGGAATTTGGTGCGACGTCT
GCGGCGCTTCAACCGGAAGAAGAGCAAGAAGAAGATTGGTTAGATGATGATAGT
CAACAAACGGTTGGTCAACAAGACGGTAGTGAGGACAATCAAACGACGACGAT
ACAAACGATAGTTGAGGTTCAACCGCAATTAGAGATGGAACTTACGCCGGTTGT
TCAAACGATAGAAGTGAATAGTTTTAGTGGTTATTTAAAACTTACGGACAATGTA
TACATAAAAAATGCGGACATAGTGGAAGAAGCGAAAAAGGTAAAACCGACGGT
GGTTGTTAATGCGGCGAATGTTTACCTTAAACATGGTGGTGGTGTTGCGGGTGCG
TTAAATAAGGCGACGAACAATGCGATGCAAGTTGAATCTGATGATTACATAGCG
ACGAATGGTCCGCTTAAAGTGGGTGGTAGTTGTGTTTTAAGCGGTCACAATCTTG
CGAAACACTGTCTTCATGTTGTCGGTCCGAATGTTAACAAAGGTGAAGACATTCA
ACTTCTTAAGAGTGCGTATGAAAATTTTAATCAACACGAAGTTCTACTTGCGCCG
TTATTATCAGCGGGTATATTTGGTGCGGACCCGATACATTCTTTACGTGTTTGTGT
AGATACGGTTCGTACGAATGTCTACTTAGCGGTCTTTGATAAAAATCTCTATGAC
AAACTTGTTTCAAGCTTTTTGGAAATGAAGAGTGAAAAGCAAGTTGAACAAAAG
ATAGCAGAGATACCGAAAGAGGAAGTTAAGCCGTTTATAACGGAAAGTAAACCG
TCAGTTGAACAGCGTAAACAAGATGATAAGAAAATAAAAGCGTGTGTTGAAGAA
GTTACGACGACGCTGGAAGAAACGAAGTTCCTCACGGAAAACTTGTTACTTTATA
TAGACATAAATGGTAATCTTCATCCGGATTCTGCGACGCTTGTTAGTGACATAGA
CATAACGTTCTTAAAGAAAGATGCGCCGTATATAGTGGGTGATGTTGTTCAAGAG
GGTGTTTTAACGGCGGTGGTTATACCGACGAAAAAGGCGGGTGGTACGACGGAA
ATGCTAGCGAAAGCGTTGCGTAAAGTGCCGACGGACAATTATATAACGACGTAC
CCGGGTCAAGGTTTAAATGGTTACACGGTAGAGGAGGCGAAGACGGTGCTTAAA
AAGTGTAAAAGTGCGTTTTACATACTACCGTCTATAATATCTAATGAGAAGCAAG
AAATACTTGGTACGGTTTCTTGGAATTTGCGGGAAATGCTTGCGCATGCGGAAGA
AACGCGTAAATTAATGCCGGTCTGTGTGGAAACGAAAGCGATAGTTTCAACGAT
ACAGCGTAAATATAAGGGTATTAAAATACAAGAGGGTGTGGTTGATTATGGTGC
GCGTTTTTACTTTTACACGAGTAAAACGACGGTAGCGTCACTTATCAACACGCTT
AACGATCTAAATGAAACGCTTGTTACGATGCCGCTTGGTTATGTAACGCATGGTT
TAAATTTGGAAGAAGCGGCGCGTTATATGCGTTCTCTCAAAGTGCCGGCGACGGT
TTCTGTTTCTTCACCGGATGCGGTTACGGCGTATAATGGTTATCTTACGTCTTCTT
CTAAAACGCCGGAAGAACATTTTATTGAAACGATCTCACTTGCGGGTTCCTATAA
AGATTGGTCCTATTCTGGTCAATCTACGCAACTAGGTATAGAATTTCTTAAGCGT
GGTGATAAAAGTGTATATTACACGAGTAATCCGACGACGTTCCACCTAGATGGT
GAAGTTATCACGTTTGACAATCTTAAGACGCTTCTTTCTTTGCGTGAAGTGCGTAC
GATTAAGGTGTTTACGACGGTAGACAACATTAACCTCCACACGCAAGTTGTGGA
CATGTCAATGACGTATGGTCAACAGTTTGGTCCGACGTATTTGGATGGTGCGGAT
GTTACGAAAATAAAACCGCATAATTCACATGAAGGTAAAACGTTTTATGTTTTAC
CGAATGATGACACGCTACGTGTTGAGGCGTTTGAGTACTACCACACAACGGATC
CGAGTTTTCTGGGTCGTTACATGTCAGCGTTAAATCACACGAAAAAGTGGAAATA
CCCGCAAGTTAATGGTTTAACGTCTATTAAATGGGCGGATAACAACTGTTATCTT
GCGACGGCGTTGTTAACGCTCCAACAAATAGAGTTGAAGTTTAATCCGCCGGCG
CTACAAGATGCGTATTACCGTGCGCGTGCGGGTGAAGCGGCGAACTTTTGTGCGC
TTATCTTAGCGTACTGTAATAAGACGGTAGGTGAGTTAGGTGATGTTCGTGAAAC
GATGAGTTACTTGTTTCAACATGCGAATTTAGATTCTTGCAAACGTGTCTTGAAC
GTGGTGTGTAAAACGTGTGGTCAACAGCAAACGACGCTTAAGGGTGTAGAAGCG
GTTATGTACATGGGTACACTTTCTTATGAACAATTTAAGAAAGGTGTTCAAATAC
CGTGTACGTGTGGTAAACAAGCGACAAAATATCTAGTACAACAGGAGTCACCGT
TTGTTATGATGTCAGCGCCGCCGGCGCAGTATGAACTTAAGCATGGTACGTTTAC
GTGTGCGAGTGAGTACACGGGTAATTACCAGTGTGGTCACTATAAACATATAAC
GTCTAAAGAAACGTTGTATTGCATAGACGGTGCGTTACTTACGAAGTCCTCAGAA
TACAAAGGTCCGATTACGGATGTTTTCTACAAAGAAAACAGTTACACAACAACG
ATAAAACCGGTTACGTATAAATTGGATGGTGTTGTTTGTACGGAAATTGACCCGA
AGTTGGACAATTATTATAAGAAAGACAATTCTTATTTCACGGAGCAACCGATTGA
TCTTGTACCGAACCAACCGTATCCGAACGCGAGCTTCGATAATTTTAAGTTTGTA
TGTGATAATATCAAATTTGCGGATGATTTAAACCAATTAACGGGTTATAAGAAAC
CGGCGTCACGTGAGCTTAAAGTTACATTTTTCCCGGACTTAAATGGTGATGTGGT
GGCGATTGATTATAAACACTACACGCCGTCTTTTAAGAAAGGTGCGAAATTGTTA
CATAAACCGATTGTTTGGCATGTTAACAATGCGACGAATAAAGCGACGTATAAA
CCGAATACGTGGTGTATACGTTGTCTTTGGAGCACGAAACCGGTTGAAACATCAA
ATTCGTTTGATGTACTGAAGTCAGAGGACGCGCAGGGTATGGATAATCTTGCGTG
CGAAGATCTAAAACCGGTCTCTGAAGAAGTAGTGGAAAATCCGACGATACAGAA
AGACGTTCTTGAGTGTAATGTGAAAACGACGGAAGTTGTAGGTGACATTATACTT
AAACCGGCGAATAATAGTTTAAAAATTACGGAAGAGGTTGGTCACACAGATCTA
ATGGCGGCGTATGTAGACAATTCTAGTCTTACGATTAAGAAACCGAATGAATTAT
CTCGTGTATTAGGTTTGAAAACGCTTGCGACGCATGGTTTAGCGGCGGTTAATAG
TGTCCCGTGGGATACGATAGCGAATTATGCGAAGCCGTTTCTTAACAAAGTTGTT
AGTACGACGACGAACATAGTTACGCGTTGTTTAAACCGTGTTTGTACGAATTATA
TGCCGTATTTCTTTACGTTATTGCTACAATTGTGTACGTTTACGCGTAGTACGAAT
TCTCGTATTAAAGCGTCTATGCCGACGACGATAGCGAAGAATACGGTTAAGAGT
GTCGGTAAATTTTGTCTAGAGGCGTCATTTAATTATTTGAAGTCACCGAATTTTTC
TAAACTGATAAATATTATAATTTGGTTTTTACTATTAAGTGTTTGCCTAGGTTCTT
TAATCTACTCAACCGCGGCGTTAGGTGTTTTAATGTCTAATTTAGGTATGCCGTCT
TACTGTACGGGTTACCGTGAAGGTTATTTGAACTCTACGAATGTCACGATTGCGA
CGTACTGTACGGGTTCTATACCGTGTAGTGTTTGTCTTAGTGGTTTAGATTCTTTA
GACACGTATCCGTCTTTAGAAACGATACAAATTACGATTTCATCTTTTAAATGGG
ATTTAACGGCGTTTGGTTTAGTTGCGGAGTGGTTTTTGGCGTATATTCTTTTCACG
CGTTTTTTCTATGTACTTGGTTTGGCGGCGATCATGCAATTGTTTTTCAGCTATTTT
GCGGTACATTTTATTAGTAATTCTTGGCTTATGTGGTTAATAATTAATCTTGTACA
AATGGCGCCGATTTCAGCGATGGTTAGAATGTACATCTTCTTTGCGTCATTTTATT
ATGTATGGAAAAGTTATGTGCATGTTGTAGACGGTTGTAATTCATCAACGTGTAT
GATGTGTTACAAACGTAATAGAGCGACGCGTGTCGAATGTACGACGATTGTTAAT
GGTGTTAGACGTTCCTTTTATGTCTATGCGAATGGTGGTAAAGGTTTTTGCAAACT
ACACAATTGGAATTGTGTTAATTGTGATACGTTCTGTGCGGGTAGTACGTTTATT
AGTGATGAAGTTGCGCGTGACTTGTCACTACAGTTTAAACGTCCGATAAATCCGA
CGGACCAGTCTTCTTACATCGTTGATAGTGTTACGGTGAAGAATGGTTCCATCCA
TCTTTACTTTGATAAAGCGGGTCAAAAGACGTATGAACGTCATTCTCTCTCTCATT
TTGTTAACTTAGACAACCTGCGTGCGAATAACACGAAAGGTTCATTGCCGATTAA
TGTTATAGTTTTTGATGGTAAATCAAAATGTGAAGAATCATCTGCGAAATCAGCG
TCTGTTTACTACAGTCAGCTTATGTGTCAACCGATACTGTTACTAGATCAGGCGTT
AGTGTCTGATGTTGGTGATAGTGCGGAAGTTGCGGTTAAAATGTTTGATGCGTAC
GTTAATACGTTTTCATCAACGTTTAACGTACCGATGGAAAAACTCAAAACGCTAG
TTGCGACGGCGGAAGCGGAACTTGCGAAGAATGTGTCCTTAGACAATGTCTTATC
TACGTTTATTTCAGCGGCGCGTCAAGGTTTTGTTGATTCAGATGTAGAAACGAAA
GATGTTGTTGAATGTCTTAAATTGTCACATCAATCTGACATAGAAGTTACGGGTG
ATAGTTGTAATAACTATATGCTCACGTATAACAAAGTTGAAAACATGACGCCGC
GTGACCTTGGTGCGTGTATTGACTGTAGTGCGCGTCATATTAATGCGCAGGTAGC
GAAAAGTCACAACATTGCGTTGATATGGAACGTTAAAGATTTCATGTCATTGTCT
GAACAACTACGTAAACAAATACGTAGTGCGGCGAAAAAGAATAACTTACCGTTT
AAGTTGACGTGTGCGACGACGCGTCAAGTTGTTAATGTTGTAACGACGAAGATA
GCGCTTAAGGGTGGTAAAATTGTTAATAATTGGTTGAAGCAATTAATTAAA
SEQ ID NO: 67 - Clone pCCI-4K-SARS-COV-2-4N-1-delta, with notable
sequences underlined or otherwise identified (eg. restriction enzyme sites, nucelotide
differences):
GATGTGCTGCAAGGCGATTAAGTTGGGTAACGCCAGGGTTTTCCCAGT
CACGACGTTGTAAAACGACGGCCAGTGAATTGTAATACGACTCACTATAGGGCG
AATTCTAGTTATTAATAGTAATCAATTACGGGGTCATTAGTTCATAGCCCATATA
TGGAGTTCCGCGTTACATAACTTACGGTAAATGGCCCGCCTGGCTGACCGCCCAA
CGACCCCCGCCCATTGACGTCAATAATGACGTATGTTCCCATAGTAACGCCAATA
GGGACTTTCCATTGACGTCAATGGGTGGAGTATTTACGGTAAACTGCCCACTTGG
CAGTACATCAAGTGTATCATATGCCAAGTACGCCCCCTATTGACGTCAATGACGG
TAAATGGCCCGCCTGGCATTATGCCCAGTACATGACCTTATGGGACTTTCCTACT
TGGCAGTACATCTACGTATTAGTCATCGCTATTACCATGGTGATGCGGTTTTGGC
AGTACATCAATGGGCGTGGATAGCGGTTTGACTCACGGGGATTTCCAAGTCTCCA
CCCCATTGACGTCAATGGGAGTTTGTTTTGGCACCAAAATCAACGGGACTTTCCA
AAATGTCGTAACAACTCCGCCCCATTGACGCAAATGGGCGGTAGGCGTGTACGG
TGGGAGGTCTATATAAGCAGAGCTGGTTTAGTGAACCGTATTAAAGGTTTATACC
TTCCCAGGTAACAAACCAACCAACTTTCGATCTCTTGTAGATCTGTTCTCTAAAC
GAACTTTAAAATCTGTGTGGCTGTCACTCGGCTGCATGCTTAGTGCACTCACGCA
GTATAATTAATAACTAATTACTGTCGTTGACAGGACACGAGTAACTCGTCTATCT
TCTGCAGGCTGCTTACGGTTTCGTCCGTGTTGCAGCCGATCATCAGCACATCTAG
GTTTCGTCCGGGTGTGACCGAAAGGTAAGATGGAGAGCCTTGTCCCTGGTTTCAA
CGAGAAAACACACGTCCAACTCAGTTTGCCTGTTTTACAGGTTCGCGACGTGCTC
GTACGTGGCTTTGGAGACTCCGTGGAGGAGGTCTTATCAGAGGCACGTCAACAT
CTTAAAGATGGCACTTGTGGCTTAGTAGAAGTTGAAAAAGGCGTTTTGCCTCAAC
TTGAACAGCCCTATGTGTTCATCAAACGTTCGGATGCTCGAACTGCACCTCATGG
TCATGTTATGGTTGAGCTGGTAGCAGAACTCGAAGGCATTCAGTACGGTCGTAGT
GGTGAGACACTTGGTGTCCTTGTCCCTCATGTGGGCGAAATACCAGTGGCTTACC
GCAAGGTTCTTCTTCGTAAGAACGGTAATAAAGGAGCTGGTGGCCATAGTTACG
GCGCCGATCTAAAGTCATTTGACTTAGGCGACGAGCTTGGCACTGATCCTTATGA
AGATTTTCAAGAAAACTGGAACACTAAACATAGCAGTGGTGTTACCCGTGAACT
CATGCGTGAGCTTAACGGAGGGGCATACACTCGCTATGTCGATAACAACTTCTGT
GGCCCTGATGGCTACCCTCTTGAGTGCATTAAAGACCTTCTAGCACGTGCTGGTA
AAGCTTCATGCACTTTGTCCGAACAACTGGACTTTATTGACACTAAGAGGGGTGT
ATACTGCTGCCGTGAACATGAGCATGAAATTGCTTGGTACACGGAACGTTCTGAA
AAGAGCTATGAATTGCAGACACCTTTTGAAATTAAATTGGCAAAGAAATTTGAC
ACCTTCAATGGGGAATGTCCAAATTTTGTATTTCCCTTAAATTCCATAATCAAGA
CTATTCAACCAAGGGTTGAAAAGAAAAAGCTTGATGGCTTTATGGGTAGAATTC
GATCTGTCTATCCAGTTGCGTCACCAAATGAATGCAACCAAATGTGCCTTTCAAC
TCTCATGAAGTGTGATCATTGTGGTGAAACTTCATGGCAGACGGGCGATTTTGTT
AAAGCCACTTGCGAATTTTGTGGCACTGAGAATTTGACTAAAGAAGGTGCCACT
ACTTGTGGTTACTTACCCCAAAATGCTGTTGTTAAAATTTATTGTCCAGCATGTCA
CAATTCAGAAGTAGGACCTGAGCATAGTCTTGCCGAATACCATAATGAATCTGG
CTTGAAAACCATTCTTCGTAAGGGTGGTCGCACTATTGCCTTTGGAGGCTGTGTG
TTCTCTTATGTTGGTTGCCATAACAAGTGTGCCTATTGGGTCCCACGTGCTAGCG
CTAACATAGGTTGTAACCATACAGGTGTTGTTGGAGAAGGTTCCGAAGGTCTTAA
TGACAACCTTCTTGAAATACTCCAAAAAGAGAAAGTCAACATCAATATTGTTGGT
GACTTTAAACTTAATGAAGAGATCGCCATTATTTTGGCATCTTTTTCTGCTTCCAC
AAGTGCTTTTGTGGAAACTGTGAAAGGTTTGGATTATAAAGCATTCAAACAAATT
GTTGAATCCTGTGGTAATTTTAAAGTTACAAAAGGAAAAGCTAAAAAAGGTGCC
TGGAATATTGGTGAACAGAAATCAATACTGAGTCCTCTTTATGCATTTGCATCAG
AGGCTGCTCGTGTTGTACGATCAATTTTCTCCCGCACTCTTGAAACTGCTCAAAA
TTCTGTGCGTGTTTTACAGAAGGCCGCTATAACAATACTAGATGGAATTTCACAG
TATTCACTGAGACTCATTGATGCTATGATGTTCACATCTGATTTGGCTACTAACAA
TCTAGTTGTAATGGCCTACATTACAGGTGGTGTTGTTCAGTTGACTTCGCAGTGG
CTAACTAACATCTTTGGCACTGTTTATGAAAAACTCAAACCCGTCCTTGATTGGC
TTGAAGAGAAGTTTAAGGAAGGTGTAGAGTTTCTTAGAGACGGTTGGGAAATTG
TTAAATTTATCTCAACCTGTGCTTGTGAAATTGTCGGTGGACAAATTGTCACCTGT
GCAAAGGAAATTAAGGAGAGTGTTCAGACATTCTTTAAGCTTGTAAATAAATTTT
TGGCTTTGTGTGCTGACTCTATCATTATTGGTGGAGCTAAACTTAAAGCCTTGAAT
TTAGGTGAAACATTTGTCACGCACTCAAAGGGATTGTACAGAAAGTGTGTTAAAT
CCAGAGAAGAAACTGGCCTACTCATGCCTCTAAAAGCCCCAAAAGAAATTATCT
TCTTAGAGGGAGAAACACTTCCCACAGAAGTGTTAACAGAGGAAGTTGTCTTGA
AAACTGGTGATTTACAACCATTAGAACAACCTACTAGTGAAGCTGTTGAAGCTCC
ATTGGTTGGTACACCAGTTTGTATTAACGGGCTTATGTTGCTCGAAATCAAAGAC
ACAGAAAAGTACTGTGCCCTTGCACCTAATATGATGGTAACAAACAATACCTTCA
CACTCAAAGGCGGTGCACCAACAAAGGTTACTTTTGGTGATGACACTGTGATAG
AAGTGCAAGGTTACAAGAGTGTGAATATCACTTTTGAACTTGATGAAAGGATTG
ATAAAGTACTTAATGAGAAGTGCTCTGCCTATACAGTTGAACTCGGTACAGAAGT
AAATGAGTTCGCCTGTGTTGTGGCAGATGCTGTCATAAAAACTTTGCAACCAGTA
TCTGAATTACTTACACCACTGGGCATTGATTTAGATGAGTGGAGTATGGCTACAT
ACTACTTATTTGATGAGTCTGGTGAGTTTAAATTGGCTTCACATATGTATTGTTCT
TTCTACCCTCCAGATGAGGATGAAGAAGAAGGTGATTGTGAAGAAGAAGAGTTT
GAGCCATCAACTCAATATGAGTATGGTACTGAAGATGATTACCAAGGTAAACCT
TTGGAATTTGGTGCCACTTCTGCTGCTCTTCAACCTGAAGAAGAGCAAGAAGAAG
ATTGGTTAGATGATGATAGTCAACAAACTGTTGGTCAACAAGACGGCAGTGAGG
ACAATCAGACAACTACTATTCAAACAATTGTTGAGGTTCAACCTCAATTAGAGAT
GGAACTTACACCAGTTGTTCAGACTATTGAAGTGAATAGTTTTAGTGGTTATTTA
AAACTTACTGACAATGTATACATTAAAAATGCAGACATTGTGGAAGAAGCTAAA
AAGGTAAAACCAACAGTGGTTGTTAATGCAGCCAATGTTTACCTTAAACATGGA
GGAGGTGTTGCAGGAGCCTTAAATAAGGCTACTAACAATGCCATGCAAGTTGAA
TCTGATGATTACATAGCTACTAATGGACCACTTAAAGTGGGTGGTAGTTGTGTTT
TAAGCGGACACAATCTTGCTAAACACTGTCTTCATGTTGTCGGCCCAAATGTTAA
CAAAGGTGAAGACATTCAACTTCTTAAGAGTGCTTATGAAAATTTTAATCAGCAC
GAAGTTCTACTTGCACCATTATTATCAGCTGGTATTTTTGGTGCTGACCCTATACA
TTCTTTAAGAGTTTGTGTAGATACTGTTCGCACAAATGTCTACTTAGCTGTCTTTG
ATAAAAATCTCTATGACAAACTTGTTTCAAGCTTTTTGGAAATGAAGAGTGAAAA
GCAAGTTGAACAAAAGATCGCTGAGATTCCTAAAGAGGAAGTTAAGCCATTTAT
AACTGAAAGTAAACCTTCAGTTGAACAGAGAAAACAAGATGATAAGAAAATCA
AAGCTTGTGTTGAAGAAGTTACAACAACTCTGGAAGAAACTAAGTTCCTCACAG
AAAACTTGTTACTTTATATTGACATTAATGGCAATCTTCATCCAGATTCTGCCACT
CTTGTTAGTGACATTGACATCACTTTCTTAAAGAAAGATGCTCCATATATAGTGG
GTGATGTTGTTCAAGAGGGTGTTTTAACTGCTGTGGTTATACCTACTAAAAAGGC
TGGTGGCACTACTGAAATGCTAGCGAAAGCTTTGAGAAAAGTGCCAACAGACAA
TTATATAACCACTTACCCGGGTCAGGGTTTAAATGGTTACACTGTAGAGGAGGC
AAAGACAGTGCTTAAAAAGTGTAAAAGTGCCTTTTACATTCTACCATCTATTATC
TCTAATGAGAAGCAAGAAATTCTTGGAACTGTTTCTTGGAATTTGCGAGAAATGC
TTGCACATGCAGAAGAAACACGCAAATTAATGCCTGTCTGTGTGGAAACTAAAG
CCATAGTTTCAACTATACAGCGTAAATATAAGGGTATTAAAATACAAGAGGGTG
TGGTTGATTATGGTGCTAGATTTTACTTTTACACCAGTAAAACAACTGTAGCGTC
ACTTATCAACACACTTAACGATCTAAATGAAACTCTTGTTACAATGCCACTTGGC
TATGTAACACATGGCTTAAATTTGGAAGAAGCTGCTCGGTATATGAGATCTCTCA
AAGTGCCAGCTACAGTTTCTGTTTCTTCACCTGATGCTGTTACAGCGTATAATGGT
TATCTTACTTCTTCTTCTAAAACACCTGAAGAACATTTTATTGAAACCATCTCACT
TGCTGGTTCCTATAAAGATTGGTCCTATTCTGGACAATCTACACAACTAGGTATA
GAATTTCTTAAGAGAGGTGATAAAAGTGTATATTACACTAGTAATCCTACCACAT
TCCACCTAGATGGTGAAGTTATCACCTTTGACAATCTTAAGACACTTCTTTCTTTG
AGAGAAGTGAGGACTATTAAGGTGTTTACAACAGTAGACAACATTAACCTCCAC
ACGCAAGTTGTGGACATGTCAATGACATATGGACAACAGTTTGGTCCAACTTATT
TGGATGGAGCTGATGTTACTAAAATAAAACCTCATAATTCACATGAAGGTAAAA
CATTTTATGTTTTACCTAATGATGACACTCTACGTGTTGAGGCTTTTGAGTACTAC
CACACAACTGATCCTAGTTTTCTGGGTAGGTACATGTCAGCATTAAATCACACTA
AAAAGTGGAAATACCCACAAGTTAATGGTTTAACTTCTATTAAATGGGCAGATA
ACAACTGTTATCTTGCCACTGCATTGTTAACACTCCAACAAATAGAGTTGAAGTT
TAATCCACCTGCTCTACAAGATGCTTATTACAGAGCAAGGGCTGGTGAAGCTGCT
AACTTTTGTGCACTTATCTTAGCCTACTGTAATAAGACAGTAGGTGAGTTAGGTG
ATGTTAGAGAAACAATGAGTTACTTGTTTCAACATGCCAATTTAGATTCTTGCAA
AAGAGTCTTGAACGTGGTGTGTAAAACTTGTGGACAACAGCAGACAACCCTTAA
GGGTGTAGAAGCTGTTATGTACATGGGCACACTTTCTTATGAACAATTTAAGAAA
GGTGTTCAGATACCTTGTACGTGTGGTAAACAAGCTACAAAATATCTAGTACAAC
AGGAGTCACCTTTTGTTATGATGTCAGCACCACCTGCTCAGTATGAACTTAAGCA
TGGTACATTTACTTGTGCTAGTGAGTACACTGGTAATTACCAGTGTGGTCACTAT
AAACATATAACTTCTAAAGAAACTTTGTATTGCATAGACGGTGCTTTACTTACAA
AGTCCTCAGAATACAAAGGTCCTATTACGGATGTTTTCTACAAAGAAAACAGTTA
CACAACAACCATAAAACCAGTTACTTATAAATTGGATGGTGTTGTTTGTACAGAA
ATTGACCCTAAGTTGGACAATTATTATAAGAAAGACAATTCTTATTTCACAGAGC
AACCAATTGATCTTGTACCAAACCAACCATATCCAAACGCAAGCTTCGATAATTT
TAAGTTTGTATGTGATAATATCAAATTTGCTGATGATTTAAACCAGTTAACTGGTT
ATAAGAAACCTGCTTCAAGAGAGCTTAAAGTTACATTTTTCCCTGACTTAAATGG
TGATGTGGTGGCTATTGATTATAAACACTACACACCCTCTTTTAAGAAAGGAGCT
AAATTGTTACATAAACCTATTGTTTGGCATGTTAACAATGCAACTAATAAAGCCA
CGTATAAACCAAATACCTGGTGTATACGTTGTCTTTGGAGCACAAAACCAGTTGA
AACATCAAATTCGTTTGATGTACTGAAGTCAGAGGACGCGCAGGGAATGGATAA
TCTTGCCTGCGAAGATCTAAAACCAGTCTCTGAAGAAGTAGTGGAAAATCCTACC
ATACAGAAAGACGTTCTTGAGTGTAATGTGAAAACTACCGAAGTTGTAGGAGAC
ATTATACTTAAACCAGCAAATAATAGTTTAAAAATTACAGAAGAGGTTGGCCAC
ACAGATCTAATGGCTGCTTATGTAGACAATTCTAGTCTTACTATTAAGAAACCTA
ATGAATTATCTAGAGTATTAGGTTTGAAAACCCTTGCTACTCATGGTTTAGCTGCT
GTTAATAGTGTCCCTTGGGATACTATAGCTAATTATGCTAAGCCTTTTCTTAACAA
AGTTGTTAGTACAACTACTAACATAGTTACACGGTGTTTAAACCGTGTTTGTACT
AATTATATGCCTTATTTCTTTACTTTATTGCTACAATTGTGTACTTTTACTAGAAGT
ACAAATTCTAGAATTAAAGCATCTATGCCGACTACTATAGCAAAGAATACTGTTA
AGAGTGTCGGTAAATTTTGTCTAGAGGCTTCATTTAATTATTTGAAGTCACCTAAT
TTTTCTAAACTGATAAATATTATAATTTGGTTTTTACTATTAAGTGTTTGCCTAGG
TTCTTTAATATACTCAACGGCGGCGTTAGGTGTTTTAATGTCTAATTTAGGCATGC
CGTCTTACTGTACGGGTTACAGAGAAGGCTATTTGAACTCTACGAATGTCACGAT
AGCGACGTACTGTACGGGTTCTATACCGTGTAGTGTTTGTCTTAGTGGTTTAGATT
CTTTAGACACGTATCCGTCTTTAGAAACGATACAAATAACGATATCATCTTTTAA
ATGGGATTTAACGGCGTTTGGCTTAGTTGCGGAGTGGTTTTTGGCGTATATTCTTT
TCACGAGGTTTTTCTATGTACTTGGATTGGCGGCGATAATGCAATTGTTTTTCAGC
TATTTTGCGGTACATTTTATAAGTAATTCTTGGCTTATGTGGTTAATAATAAATCT
TGTACAAATGGCGCCGATATCAGCGATGGTTAGAATGTACATATTCTTTGCGTCA
TTTTATTATGTATGGAAAAGTTATGTGCATGTTGTAGACGGTTGTAATTCATCAAC
GTGTATGATGTGTTACAAACGTAATAGAGCGACGAGAGTCGAATGTACGACGAT
AGTTAATGGTGTTAGAAGGTCCTTTTATGTCTATGCGAATGGAGGTAAAGGCTTT
TGCAAACTACACAATTGGAATTGTGTTAATTGTGATACGTTCTGTGCGGGTAGTA
CGTTTATAAGTGATGAAGTTGCGAGAGACTTGTCACTACAGTTTAAAAGACCGAT
AAATCCGACGGACCAGTCTTCTTACATAGTTGATAGTGTTACGGTGAAGAATGGT
TCCATACATCTTTACTTTGATAAAGCGGGTCAAAAGACGTATGAAAGACATTCTC
TCTCTCATTTTGTTAACTTAGACAACCTGAGAGCGAATAACACGAAAGGTTCATT
GCCGATAAATGTTATAGTTTTTGATGGTAAATCAAAATGTGAAGAATCATCTGCG
AAATCAGCGTCTGTTTACTACAGTCAGCTTATGTGTCAACCGATACTGTTACTAG
ATCAGGCGTTAGTGTCTGATGTTGGTGATAGTGCGGAAGTTGCGGTTAAAATGTT
TGATGCGTACGTTAATACGTTTTCATCAACGTTTAACGTACCGATGGAAAAACTC
AAAACGCTAGTTGCGACGGCGGAAGCGGAACTTGCGAAGAATGTGTCCTTAGAC
AATGTCTTATCTACGTTTATATCAGCGGCGCGGCAAGGGTTTGTTGATTCAGATG
TAGAAACGAAAGATGTTGTTGAATGTCTTAAATTGTCACATCAATCTGACATAGA
AGTTACGGGCGATAGTTGTAATAACTATATGCTCACGTATAACAAAGTTGAAAAC
ATGACGCCGCGTGACCTTGGTGCGTGTATAGACTGTAGTGCGCGTCATATAAATG
CGCAGGTAGCGAAAAGTCACAACATAGCGTTGATATGGAACGTTAAAGATTTCA
TGTCATTGTCTGAACAACTACGAAAACAAATACGTAGTGCGGCGAAAAAGAATA
ACTTACCGTTTAAGTTGACGTGTGCGACGACGAGACAAGTTGTTAATGTTGTAAC
GACGAAGATAGCGCTTAAGGGTGGTAAAATAGTTAATAATTGGTTGAAGCAGTT
AATTAAAGTTACACTTGTGTTCCTTTTTGTTGCTGCTATTTTCTATTTAATAACAC
CTGTTCATGTCATGTCTAAACATACTGACTTTTCAAGTGAAATCATAGGATACAA
GGCTATTGATGGTGGTGTCACTCGTGACATAGCATCTACAGATACTTGTTTTGCT
AACAAACATGCTGATTTTGACACATGGTTTAGCCAGCGTGGTGGTAGTTATACTA
ATGACAAAGCTTGCCCATTGATTGCTGCAGTCATAACAAGAGAAGTGGGTTTTGT
CGTGCCTGGTTTGCCTGGCACGATATTACGCACAACTAATGGTGACTTTTTGCAT
TTCTTACCTAGAGTTTTTAGTGCAGTTGGTAACATCTGTTACACACCATCAAAACT
TATAGAGTACACTGACTTTGCAACATCAGCTTGTGTTTTGGCTGCTGAATGTACA
ATTTTTAAAGATGCTTCTGGTAAGCCAGTACCATATTGTTATGATACCAATGTACT
AGAAGGTTCTGTTGCTTATGAAAGTTTACGCCCTGACACACGTTATGTGCTCATG
GATGGCTCTATTATTCAATTTCCTAACACCTACCTTGAAGGTTCTGTTAGAGTGGT
AACAACTTTTGATTCTGAGTACTGTAGGCACGGCACTTGTGAAAGATCAGAAGCT
GGTGTTTGTGTATCTACTAGTGGTAGATGGGTACTTAACAATGATTATTACAGAT
CTTTACCAGGAGTTTTCTGTGGTGTAGATGCTGTAAATTTACTTACTAATATGTTT
ACACCACTAATTCAACCTATTGGTGCTTTGGACATATCAGCATCTATAGTAGCTG
GTGGTATTGTAGCTATCGTAGTAACATGCCTTGCCTACTATTTTATGAGGTTTAGA
AGAGCTTTTGGTGAATACAGTCATGTAGTTGCCTTTAATACTTTACTATTCCTTAT
GTCATTCACTGTACTCTGTTTAACACCAGTTTACTCATTCTTACCTGGTGTTTATTC
TGTTATTTACTTGTACTTGACATTTTATCTTACTAATGATGTTTCTTTTTTAGCACA
TATTCAGTGGATGGTTATGTTCACACCTTTAGTACCTTTCTGGATAACAATTGCTT
ATATCATTTGTATTTCCACAAAGCATTTCTATTGGTTCTTTAGTAATTACCTAAAG
AGACGTGTAGTCTTTAATGGTGTTTCCTTTAGTACTTTTGAAGAAGCTGCGCTGTG
CACCTTTTTGTTAAATAAAGAAATGTATCTAAAGTTGCGTAGTGATGTGCTATTA
CCTCTTACGCAATATAATAGATACTTAGCTCTTTATAATAAGTACAAGTATTTTAG
TGGAGCAATGGATACAACTAGCTACAGAGAAGCTGCTTGTTGTCATCTCGCAAA
GGCTCTCAATGACTTCAGTAACTCAGGTTCTGATGTTCTTTACCAACCACCACAA
ACCTCTATCACCTCAGCTGTTTTGCAGAGTGGTTTTAGAAAAATGGCATTCCCAT
CTGGTAAAGTTGAGGGTTGTATGGTACAAGTAACTTGTGGTACAACTACACTTAA
CGGTCTTTGGCTTGATGACGTAGTTTACTGTCCAAGACATGTGATCTGCACCTCT
GAAGACATGCTTAACCCTAATTATGAAGATTTACTCATTCGTAAGTCTAATCATA
ATTTCTTGGTACAGGCTGGTAATGTTCAACTCAGGGTTATTGGACATTCTATGCA
AAATTGTGTACTTAAGCTTAAGGTTGATACAGCCAATCCTAAGACACCTAAGTAT
AAGTTTGTTCGCATTCAACCAGGACAGACTTTTTCAGTGTTAGCTTGTTACAATG
GTTCACCATCTGGTGTTTACCAATGTGCTATGAGGCCCAATTTCACTATTAAGGG
TTCATTCCTTAATGGTTCATGTGGTAGTGTTGGTTTTAACATAGATTATGACTGTG
TCTCTTTTTGTTACATGCACCATATGGAATTACCAACTGGAGTTCATGCTGGCAC
AGACTTAGAAGGTAACTTTTATGGACCTTTTGTTGACAGGCAAACAGCACAAGC
AGCTGGTACGGACACAACTATTACAGTTAATGTTTTAGCTTGGTTGTACGCTGCT
GTTATAAATGGAGACAGGTGGTTTCTCAATCGATTTACCACAACTCTTAATGACT
TTAACCTTGTGGCTATGAAGTACAATTATGAACCTCTAACACAAGACCATGTTGA
CATACTAGGACCTCTTTCTGCTCAAACTGGAATTGCCGTTTTAGATATGTGTGCTT
CATTAAAAGAATTACTGCAAAATGGTATGAATGGACGTACCATATTGGGTAGTG
CTTTATTAGAAGATGAATTTACACCTTTTGATGTTGTTAGACAATGCTCAGGTGTT
ACTTTCCAAAGTGCAGTGAAAAGAACAATCAAGGGTACACACCACTGGTTGTTA
CTCACAATTTTGACTTCACTTTTAGTTTTAGTCCAGAGTACTCAATGGTCTTTGTT
CTTTTTTTTGTATGAAAATGCCTTTTTACCTTTTGCTATGGGTATTATTGCTATGTC
TGCTTTTGCAATGATGTTTGTCAAACATAAGCATGCATTTCTCTGTTTGTTTTTGTT
ACCTTCTCTTGCCACTGTAGCTTATTTTAATATGGTCTATATGCCTGCTAGTTGGG
TGATGCGTATTATGACATGGTTGGATATGGTTGATACTAGTTTGTCTGGTTTTAAG
CTAAAAGACTGTGTTATGTATGCATCAGCTGTAGTGTTACTAATCCTTATGACAG
CAAGAACTGTGTATGATGATGGTGCTAGGAGAGTGTGGACACTTATGAATGTCTT
GACACTCGTTTATAAAGTTTATTATGGTAATGCTTTAGATCAAGCCATTTCCATGT
GGGCTCTTATAATCTCTGTTACTTCTAACTACTCAGGTGTAGTTACAACTGTCATG
TTTTTGGCCAGAGGTATTGTTTTTATGTGTGTTGAGTATTGCCCTATTTTCTTCATA
ACTGGTAATACACTTCAGTGTATAATGCTAGTTTATTGTTTCTTAGGCTATTTTTG
TACTTGTTACTTTGGCCTCTTTTGTTTACTCAACCGCTACTTTAGACTGACTCTTGG
TGTTTATGATTACTTAGTTTCTACACAGGAGTTTAGATATATGAATTCACAGGGA
CTACTCCCACCCAAGAATAGCATAGATGCCTTCAAACTCAACATTAAATTGTTGG
GTGTTGGTGGCAAACCTTGTATCAAAGTAGCCACTGTACAGTCTAAAATGTCAGA
TGTAAAGTGCACATCAGTAGTCTTACTCTCAGTTTTGCAACAACTCAGAGTAGAA
TCATCATCTAAATTGTGGGCTCAATGTGTCCAGTTACACAATGACATTCTCTTAG
CTAAAGATACTACTGAAGCCTTTGAAAAAATGGTTTCACTACTTTCTGTTTTGCTT
TCCATGCAGGGTGCTGTAGACATAAACAAGCTTTGTGAAGAAATGCTGGACAAC
AGGGCAACCTTACAAGCTATAGCCTCAGAGTTTAGTTCCCTTCCATCATATGCAG
CTTTTGCTACTGCTCAAGAAGCTTATGAGCAGGCTGTTGCTAATGGTGATTCTGA
AGTTGTTCTTAAAAAGTTGAAGAAGTCTTTGAATGTGGCTAAATCTGAATTTGAC
CGTGATGCAGCCATGCAACGTAAGTTGGAAAAGATGGCTGATCAAGCTATGACC
CAAATGTATAAACAGGCTAGATCTGAGGACAAGAGGGCAAAAGTTACTAGTGCT
ATGCAGACAATGCTTTTCACTATGCTTAGAAAGTTGGATAATGATGCACTCAACA
ACATTATCAACAATGCAAGAGATGGTTGTGTTCCCTTGAACATAATACCTCTTAC
AACAGCAGCCAAACTAATGGTTGTCATACCAGACTATAACACATATAAAAATAC
GTGTGATGGTACAACATTTACTTATGCATCAGCATTGTGGGAAATCCAACAGGTT
GTAGATGCAGATAGTAAAATTGTTCAACTTAGTGAAATTAGTATGGACAATTCAC
CTAATTTAGCATGGCCTCTTATTGTAACAGCTTTAAGGGCCAATTCTGCTGTCAA
ATTACAGAATAATGAGCTTAGTCCTGTTGCACTACGACAGATGTCTTGTGCTGCC
GGTACTACACAAACTGCTTGCACTGATGACAATGCGTTAGCTTACTACAACACAA
CAAAGGGAGGTAGGTTTGTACTTGCACTGTTATCCGATTTACAGGATTTGAAATG
GGCTAGATTCCCTAAGAGTGATGGAACTGGTACTATCTATACAGAACTGGAACC
ACCTTGTAGGTTTGTTACAGACACACCTAAAGGTCCTAAAGTGAAGTATTTATAC
TTTATTAAAGGATTAAACAACCTAAATAGAGGTATGGTACTTGGTAGTTTAGCTG
CCACAGTACGTCTACAAGCTGGTAATGCAACAGAAGTGCCTGCCAATTCAACTGT
ATTATCTTTCTGTGCTTTTGCTGTAGATGCTGCTAAAGCTTACAAAGATTATCTAG
CTAGTGGGGGACAACCAATCACTAATTGTGTTAAGATGTTGTGTACACACACTGG
TACTGGTCAGGCAATAACAGTTACACCGGAAGCCAATATGGATCAAGAATCCTT
TGGTGGTGCATCGTGTTGTCTGTACTGCCGTTGCCACATAGATCATCCAAATCCT
AAAGGATTTTGTGACTTAAAAGGTAAGTATGTACAAATACCTACAACTTGTGCTA
ATGACCCTGTGGGTTTTACACTTAAAAACACAGTCTGTACCGTCTGCGGTATGTG
GAAAGGTTATGGCTGTAGTTGTGATCAACTCCGCGAACCCATGCTTCAGTCAGCT
GATGCACAATCGTTTTTAAACGGGTTTGCGGTGTAAGTGCAGCCCGTCTTACACC
GTGCGGCACAGGCACTAGTACTGATGTCGTATACAGGGCTTTTGACATCTACAAT
GATAAAGTAGCTGGTTTTGCTAAATTCCTAAAAACTAATTGTTGTCGCTTCCAAG
AAAAGGACGAAGATGACAATTTAATTGATTCTTACTTTGTAGTTAAGAGACACAC
TTTCTCTAACTACCAACATGAAGAAACAATTTATAATTTACTTAAGGATTGTCCA
GCTGTTGCTAAACATGACTTCTTTAAGTTTAGAATAGACGGTGACATGGTACCAC
ATATATCACGTCAACGTCTTACTAAATACACAATGGCAGACCTCGTCTATGCTTT
AAGGCATTTTGATGAAGGTAATTGTGACACATTAAAAGAAATACTTGTCACATAC
AATTGTTGTGATGATGATTATTTCAATAAAAAGGACTGGTATGATTTTGTAGAAA
ACCCAGATATATTACGCGTATACGCCAACTTAGGTGAACGTGTACGCCAAGCTT
TGTTAAAAACAGTACAATTCTGTGATGCCATGCGAAATGCTGGTATTGTTGGTGT
ACTGACATTAGATAATCAAGATCTCAATGGTAACTGGTATGATTTCGGTGATTTC
ATACAAACCACGCCAGGTAGTGGAGTTCCTGTTGTAGATTCTTATTATTCATTGTT
AATGCCTATATTAACCTTGACCAGGGCTTTAACTGCAGAGTCACATGTTGACACT
GACTTAACAAAGCCTTACATTAAGTGGGATTTGTTAAAATATGACTTCACGGAAG
AGAGGTTAAAACTCTTTGACCGTTATTTTAAATATTGGGATCAGACATACCACCC
AAATTGTGTTAACTGTTTGGATGACAGATGCATTCTGCATTGTGCAAACTTTAAT
GTTTTATTCTCTACAGTGTTCCCACCTACAAGTTTTGGACCACTAGTGAGAAAAA
TATTTGTTGATGGTGTTCCATTTGTAGTTTCAACTGGATACCACTTCAGAGAGCTA
GGTGTTGTACATAATCAGGATGTAAACTTACATAGCTCTAGACTTAGTTTTAAGG
AATTACTTGTGTATGCTGCTGACCCTGCTATGCACGCTGCTTCTGGTAATCTATTA
CTAGATAAACGCACTACGTGCTTTTCAGTAGCTGCACTTACTAACAATGTTGCTT
TTCAAACTGTCAAACCCGGTAATTTTAACAAAGACTTCTATGACTTTGCTGTGTCT
AAGGGTTTCTTTAAGGAAGGAAGTTCTGTTGAATTAAAACACTTCTTCTTTGCTC
AGGATGGTAATGCTGCTATCAGCGATTATGACTACTATCGTTATAATCTACCAAC
AATGTGTGATATCAGACAACTACTATTTGTAGTTGAAGTTGTTGATAAGTACTTT
GATTGTTACGATGGTGGCTGTATTAATGCTAACCAAGTCATCGTCAACAACCTAG
ACAAATCAGCTGGTTTTCCATTTAATAAATGGGGTAAGGCTAGACTTTATTATGA
TTCAATGAGTTATGAGGATCAAGATGCACTTTTCGCATATACAAAACGTAATGTC
ATCCCTACTATAACTCAAATGAATCTTAAGTATGCCATTAGTGCAAAGAATAGAG
CTCGCACCGTAGCTGGTGTCTCTATCTGTAGTACTATGACCAATAGACAGTTTCA
TCAAAAATTATTGAAATCAATAGCCGCCACTAGAGGAGCTACTGTAGTAATTGG
AACAAGCAAATTCTATGGTGGTTGGCACAACATGTTAAAAACTGTTTATAGTGAT
GTAGAAAACCCTCACCTTATGGGTTGGGATTATCCTAAATGTGATAGAGCCATGC
CTAACATGCTTAGAATTATGGCCTCACTTGTTCTTGCTCGCAAACATACAACGTG
TTGTAGCTTGTCACACCGTTTCTATAGATTAGCTAATGAGTGTGCTCAAGTATTGA
GTGAAATGGTCATGTGTGGCGGTTCACTATATGTTAAACCAGGTGGAACCTCATC
AGGAGATGCCACAACTGCTTATGCTAATAGTGTTTTTAACATTTGTCAAGCTGTC
ACGGCCAATGTTAATGCACTTTTATCTACTGATGGTAACAAAATTGCCGATAAGT
ATGTCCGCAATTTACAACACAGACTTTATGAGTGTCTCTATAGAAATAGAGATGT
TGACACAGACTTTGTGAATGAGTTTTACGCATATTTGCGTAAACATTTCTCAATG
ATGATACTCTCTGACGATGCTGTTGTGTGTTTCAATAGCACTTATGCATCTCAAGG
TCTAGTGGCTAGCATAAAGAACTTTAAGTCAGTTCTTTATTATCAAAACAATGTT
TTTATGTCTGAAGCAAAATGTTGGACTGAGACTGACCTTACTAAAGGACCTCATG
AATTTTGCTCTCAACATACAATGCTAGTTAAACAGGGTGATGATTATGTGTACCT
TCCTTACCCAGATCCATCAAGAATCCTAGGGGCCGGCTGTTTTGTAGATGATATC
GTAAAAACAGATGGTACACTTATGATTGAACGGTTCGTGTCTTTAGCTATAGATG
CTTACCCACTTACTAAACATCCTAATCAGGAGTATGCTGATGTCTTTCATTTGTAC
TTACAATACATAAGAAAGCTACATGATGAGTTAACAGGACACATGTTAGACATG
TATTCTGTTATGCTTACTAATGATAACACTTCAAGGTATTGGGAACCTGAGTTTTA
TGAGGCTATGTACACACCGCATACAGTCTTACAGGCTGTTGGGGCTTGTGTTCTT
TGCAATTCACAGACTTCATTAAGATGTGGTGCTTGCATACGTAGACCATTCTTAT
GTTGTAAATGCTGTTACGACCATGTCATATCAACATCACATAAATTAGTCTTGTCT
GTTAATCCGTATGTTTGCAATGCTCCAGGTTGTGATGTCACAGATGTGACTCAAC
TTTACTTAGGAGGTATGAGCTATTATTGTAAATCACATAAACCACCCATTAGTTTT
CCATTGTGTGCTAATGGACAAGTTTTTGGTTTATATAAAAATACATGTGTTGGTA
GCGATAATGTTACTGACTTTAATGCAATTGCAACATGTGACTGGACAAATGCTGG
TGATTACATTTTAGCTAACACCTGTACTGAAAGACTCAAGCTTTTTGCAGCAGAA
ACGCTCAAAGCTACTGAGGAGACATTTAAACTGTCTTATGGTATTGCTACTGTAC
GTGAAGTGCTGTCTGACAGAGAATTACATCTTTCATGGGAAGTTGGTAAACCTAG
ACCACCACTTAACCGAAATTATGTCTTTACTGGTTATCGTGTAACTAAAAACAGT
AAAGTACAAATAGGAGAGTACACCTTTGAAAAAGGTGACTATGGTGATGCTGTT
GTTTACCGAGGTACAACAACTTACAAATTAAATGTTGGTGATTATTTTGTGCTGA
CATCACATACAGTAATGCCATTAAGTGCACCTACACTAGTGCCACAAGAGCACT
ATGTTAGAATTACTGGCTTATACCCAACACTCAATATCTCAGATGAGTTTTCTAG
CAATGTTGCAAATTATCAAAAGGTTGGTATGCAAAAGTATTCTACACTCCAGGGA
CCACCTGGTACTGGTAAGAGTCATTTTGCTATTGGCCTAGCTCTCTACTACCCTTC
TGCTCGCATAGTGTATACAGCTTGCTCTCATGCCGCTGTTGATGCACTATGTGAG
AAGGCATTAAAATATTTGCCTATAGATAAATGTAGTAGAATTATACCTGCACGTG
CTCGTGTAGAGTGTTTTGATAAATTCAAAGTGAATTCAACATTAGAACAGTATGT
CTTTTGTACTGTAAATGCATTGCCTGAGACGACAGCAGATATAGTTGTCTTTGAT
GAAATTTCAATGGCCACAAATTATGATTTGAGTGTTGTCAATGCCAGATTACGTG
CTAAGCACTATGTGTACATTGGCGACCCTGCTCAATTACCTGCACCACGCACATT
GCTAACTAAGGGCACACTAGAACCAGAATATTTCAATTCAGTGTGTAGACTTATG
AAAACTATAGGTCCAGACATGTTCCTCGGAACTTGTCGGCGTTGTCCTGCTGAAA
TTGTTGACACTGTGAGTGCTTTGGTTTATGATAATAAGCTTAAAGCACATAAAGA
CAAATCAGCTCAATGCTTTAAAATGTTTTATAAGGGTGTTATCACGCATGATGTT
TCATCTGCAATTAACAGGCCACAAATAGGCGTGGTAAGAGAATTCCTTACACGT
AACCCTGCTTGGAGAAAAGCTGTCTTTATTTCACCTTATAATTCACAGAATGCTG
TAGCCTCAAAGATTTTGGGACTACCAACTCAAACTGTTGATTCATCACAGGGCTC
AGAATATGACTATGTCATATTCACTCAAACCACTGAAACAGCTCACTCTTGTAAT
GTAAACAGATTTAATGTTGCTATTACCAGAGCAAAAGTAGGCATACTTTGCATAA
TGTCTGATAGAGACCTTTATGACAAGTTGCAATTTACAAGTCTTGAAATTCCACG
TAGGAATGTGGCAACTTTACAAGCTGAAAATGTAACAGGACTCTTTAAAGATTGT
AGTAAGGTAATCACTGGGTTACATCCTACACAGGCACCTACACACCTCAGTGTTG
ACACTAAATTCAAAACTGAAGGTTTATGTGTTGACATACCTGGCATACCTAAGG
ACATGACCTATAGAAGACTCATCTCTATGATGGGTTTTAAAATGAATTATCAAGT
TAATGGTTACCCTAACATGTTTATCACCCGCGAAGAAGCTATAAGACATGTACGT
GCATGGATTGGCTTCGATGTCGAGGGGTGTCATGCTACTAGAGAAGCTGTTGGTA
CCAATTTACCTTTACAGCTAGGTTTTTCTACAGGTGTTAACCTAGTTGCTGTACCT
ACAGGTTATGTTGATACACCTAATAATACAGATTTTTCCAGAGTTAGTGCTAAAC
CACCGCCTGGAGATCAATTTAAACACCTCATACCACTTATGTACAAAGGACTTCC
TTGGAATGTAGTGCGTATAAAGATTGTACAAATGTTAAGTGACACACTTAAAAAT
CTCTCTGACAGAGTCGTATTTGTCTTATGGGCACATGGCTTTGAGTTGACATCTAT
GAAGTATTTTGTGAAAATAGGACCTGAGCGCACCTGTTGTCTATGTGATAGACGT
GCCACATGCTTTTCCACTGCTTCAGACACTTATGCCTGTTGGCATCATTCTATTGG
ATTTGATTACGTCTATAATCCGTTTATGATTGATGTTCAACAATGGGGTTTTACAG
GTAACCTACAAAGCAACCATGATCTGTATTGTCAAGTCCATGGTAATGCACATGT
AGCTAGTTGTGATGCAATCATGACTAGGTGTCTAGCTGTCCACGAGTGCTTTGTT
AAGCGTGTTGACTGGACTATTGAATATCCTATAATTGGTGATGAACTGAAGATTA
ATGCGGCTTGTAGAAAGGTTCAACACATGGTTGTTAAAGCTGCATTATTAGCAGA
CAAATTCCCAGTTCTTCACGACATTGGTAACCCTAAAGCTATTAAGTGTGTACCT
CAAGCTGATGTAGAATGGAAGTTCTATGATGCACAGCCTTGTAGTGACAAAGCTT
ATAAAATAGAAGAATTATTCTATTCTTATGCCACACATTCTGACAAATTCACAGA
TGGTGTATGCCTATTTTGGAATTGCAATGTCGATAGATATCCTGCTAATTCCATTG
TTTGTAGATTTGACACTAGAGTGCTATCTAACCTTAACTTGCCTGGTTGTGATGGT
GGCAGTTTGTATGTAAATAAACATGCATTCCACACACCAGCTTTTGATAAAAGTG
CTTTTGTTAATTTAAAACAATTACCATTTTTCTATTACTCTGACAGTCCATGTGAG
TCTCATGGAAAACAAGTAGTGTCAGATATAGATTATGTACCACTAAAGTCTGCTA
CGTGTATAACACGTTGCAATTTAGGTGGTGCTGTCTGTAGACATCATGCTAATGA
GTACAGATTGTATCTCGATGCTTATAACATGATGATCTCAGCTGGCTTTAGCTTGT
GGGTTTACAAACAATTTGATACTTATAACCTCTGGAACACTTTTACAAGACTTCA
GAGTTTAGAAAATGTGGCTTTTAATGTTGTAAATAAGGGACACTTTGATGGACAA
CAGGGTGAAGTACCAGTTTCTATCATTAATAACACTGTTTACACAAAAGTTGATG
GTGTTGATGTAGAATTGTTTGAAAATAAAACAACATTACCTGTTAATGTAGCATT
TGAGCTTTGGGCTAAGCGCAACATTAAACCAGTACCAGAGGTGAAAATACTCAA
TAATTTGGGTGTGGACATTGCTGCTAATACTGTGATCTGGGACTACAAAAGAGAT
GCTCCAGCACATATATCTACTATTGGTGTTTGTTCTATGACTGACATAGCCAAGA
AACCAACTGAAACGATTTGTGCACCACTCACTGTCTTTTTTGATGGTAGAGTTGA
TGGTCAAGTAGACTTATTTAGAAATGCCCGTAATGGTGTTCTTATTACAGAAGGT
AGTGTTAAAGGTTTACAACCATCTGTAGGTCCCAAACAAGCTAGTCTTAATGGAG
TCACATTAATTGGAGAAGCCGTAAAAACACAGTTCAATTATTATAAGAAAGTTG
ATGGTGTTGTCCAACAATTACCTGAAACTTACTTTACTCAGAGTAGAAATTTACA
AGAATTTAAACCCAGGAGTCAAATGGAAATTGATTTCTTAGAATTAGCTATGGAT
GAATTCATTGAACGGTATAAATTAGAAGGCTATGCCTTCGAACATATCGTTTATG
GAGATTTTAGTCATAGTCAGTTAGGTGGTTTACATCTACTGATTGGACTAGCTAA
ACGTTTTAAGGAATCACCTTTTGAATTAGAAGATTTTATTCCTATGGACAGTACA
GTTAAAAACTATTTCATAACAGATGCGCAAACAGGTTCATCTAAGTGTGTGTGTT
CTGTTATTGATTTATTACTTGATGATTTTGTTGAAATAATAAAATCCCAAGATTTA
TCTGTAGTTTCTAAGGTTGTCAAAGTGACTATTGACTATACAGAAATTTCATTTAT
GCTTTGGTGTAAAGATGGCCATGTAGAAACATTTTACCCAAAATTACAATCTAGT
CAAGCGTGGCAACCGGGTGTTGCTATGCCTAATCTTTACAAAATGCAAAGAATG
CTATTAGAAAAGTGTGACCTTCAAAATTATGGTGATAGTGCAACATTACCTAAAG
GCATAATGATGAATGTCGCAAAATATACTCAACTGTGTCAATATTTAAACACATT
AACATTAGCTGTACCCTATAATATGAGAGTTATACATTTTGGTGCTGGTTCTGAT
AAAGGAGTTGCACCAGGTACAGCTGTTTTAAGACAGTGGTTGCCTACGGGTACG
CTGCTTGTCGATTCAGATCTTAATGACTTTGTCTCTGATGCAGATTCAACTTTGAT
TGGTGATTGTGCAACTGTACATACAGCTAATAAATGGGATCTCATTATTAGTGAT
ATGTACGACCCTAAGACTAAAAATGTTACAAAAGAAAATGACTCTAAAGAGGGT
TTTTTCACTTACATTTGTGGGTTTATACAACAAAAGCTAGCTCTTGGAGGTTCCGT
GGCTATAAAGATAACAGAACATTCTTGGAATGCTGATCTTTATAAGCTCATGGGA
CACTTCGCATGGTGGACAGCCTTTGTTACTAATGTGAATGCGTCATCATCTGAAG
CATTTTTAATTGGATGTAATTATCTTGGCAAACCACGCGAACAAATAGATGGTTA
TGTCATGCATGCAAATTACATATTTTGGAGGAATACAAATCCAATTCAGTTGTCT
TCCTATTCTTTATTTGACATGAGTAAATTTCCCCTTAAATTAAGGGGTACTGCTGT
TATGTCTTTAAAAGAAGGTCAAATCAATGATATGATTTTATCTCTTCTTAGTAAA
GGTAGACTTATAATTAGAGAAAACAACAGAGTTGTTATTTCTAGTGATGTTCTTG
TTAACAACTAAACGAACAATGTTTGTTTTTCTTGTTTTATTGCCACTAGTCTCTAG
TCAGTGTGTTAATCTTACAACCAGAACTCAATTACCCCCTGCATACACTAATTCTT
TCACACGTGGTGTTTATTACCCTGACAAAGTTTTCAGATCCTCAGTTTTACATTCA
ACTCAGGACTTGTTCTTACCTTTCTTTTCCAATGTTACTTGGTTCCATGCTATACAT
GTCTCTGGGACCAATGGTACTAAGAGGTTTGATAACCCTGTCCTACCATTTAATG
ATGGTGTTTATTTTGCTTCCAtTGAGAAGTCTAACATAATAAGAGGCTGGATTTTT
GGTACTACTTTAGAcTCGAAGACCCAGTCCCTACTTATTGTTAATAACGCTACTAA
TGTTGTTATTAAAGTCTGTGAATTTCAATTTTGTAATGATCCATTTTTGGaTGTTTA
TTACCACAAAAACAACAAAAGTTGGATGaAAAGTGAGTTCAGAGTTTATTCTAGT
GCGAATAATTGCACTTTTGAATATGTCTCTCAGCCTTTTCTTATGGACCTTGAAGG
AAAACAGGGTAATTTCAAAAATCTTAGGGAATTTGTGTTTAAGAATATTGATGGT
TATTTTAAAATATATTCTAAGCACACGCCTATTAATTTAGTGCGTGATCTCCCtCA
GGGTTTTTCGGCTTTAGAACCATTGGTAGATTTGCCAATAGGTATTAACATCACT
AGGTTTCAAACTTTACTTGCTTTACATAGAAGTTATTTGACTCCTGGTGATTCTTC
TTCAGGTTGGACAGCTGGTGCTGCAGCTTATTATGTGGGTTATCTTCAACCTAGG
ACTTTTCTATTAAAATATAATGAAAATGGAACCATTACAGATGCTGTAGACTGTG
CACTTGACCCTCTCTCAGAAACAAAGTGTACGTTGAAATCCTTCACTGTAGAAAA
AGGAATCTATCAAACTTCTAACTTTAGAGTCCAACCAACAGAATCTATTGTTAGA
TTTCCTAATATTACAAACTTGTGCCCTTTTGGTGAAGTTTTTAACGCCACCAGATT
TGCATCTGTTTATGCTTGGAACAGGAAGAGAATCAGCAACTGTGTTGCTGATTAT
TCTGTCCTATATAATTCCGCATCATTTTCCACTTTTAAGTGTTATGGAGTGTCTCC
TACTAAATTAAATGATCTCTGCTTTACTAATGTCTATGCAGATTCATTTGTAATTA
GAGGTGATGAAGTCAGACAAATCGCTCCAGGGCAAACTGGAAAGATTGCTGATT
ATAATTATAAATTACCAGATGATTTTACAGGCTGCGTTATAGCTTGGAATTCTAA
CAATCTTGATTCTAAGGTTGGTGGTAATTATAATTACCgGTATAGATTGTTTAGGA
AGTCTAATCTCAAACCTTTTGAGAGAGATATTTCAACTGAAATCTATCAGGCCGG
TAGCACACCTTGTAATGGTGTTcAAGGTTTTAATTGTTACTTTCCTTTACAATCAT
ATGGTTTCCAACCCACTAATGGTGTTGGTTACCAACCATACAGAGTAGTAGTACT
TTCTTTTGAACTTCTACATGCACCAGCAACTGTTTGTGGACCTAAAAAGTCTACT
AATTTGGTTAAAAACAAATGTGTCAATTTCAACTTCAATGGTTTAACAGGCACAG
GTGTTCTTACTGAGTCTAACAAAAAGTTTCTGCCTTTCCAACAATTTGGCAGAGA
CATTGCTGACACTACTGATGCTGTCCGTGATCCACAGACACTTGAGATTCTTGAC
ATTACACCATGTTCTTTTGGTGGTGTCAGTGTTATAACACCAGGAACAAATACTT
CTAACCAGGTTGCTGTTCTTTATCAGGgTGTTAACTGCACAGAAGTCCCTGTTGCT
ATTCATGCAGATCAACTTACTCCTACTTGGCGTGTTTATTCTACAGGTTCTAATGT
TTTTCAAACACGTGCAGGCTGTTTAATAGGGGCTGAACATGTCAACAACTCATAT
GAGTGTGACATACCCATTGGTGCAGGTATATGCGCTAGTTATCAGACTCAGACTA
ATTCTCgTCGGCGGGCACGTAGTGTAGCTAGTCAATCCATCATTGCCTACACTAT
GTCACTTGGTGCAGAAAATTCAGTTGCTTACTCTAATAACTCTATTGCCATACCC
ACAAATTTTACTATTAGTGTTACCACAGAAATTCTACCAGTGTCTATGACCAAGA
CATCAGTAGATTGTACAATGTACATTTGTGGTGATTCAACTGAATGCAGCAATCT
TTTGTTGCAATATGGCAGTTTTTGTACACAATTAAACCGTGCTTTAACTGGAATA
GCTGTTGAACAAGACAAAAACACCCAAGAAGTTTTTGCACAAGTCAAACAAATT
TACAAAACACCACCAATTAAAGATTTTGGTGGTTTTAATTTTTCACAAATATTAC
CAGATCCATCAAAACCAAGCAAGAGGTCATTTATTGAAGATCTACTTTTCAACAA
AGTGACACTTGCAGATGCTGGCTTCATCAAACAATATGGTGATTGCCTTGGTGAT
ATTGCTGCTAGAGACCTCATTTGTGCACAAAAGTTTAACGGCCTTACTGTTTTGC
CACCTTTGCTCACAGATGAAATGATTGCTCAATACACTTCTGCACTGTTAGCGGG
TACAATCACTTCTGGTTGGACCTTTGGTGCAGGTGCTGCATTACAAATACCATTT
GCTATGCAAATGGCTTATAGGTTTAATGGTATTGGAGTTACACAGAATGTTCTCT
ATGAGAACCAAAAATTGATTGCCAACCAATTTAATAGTGCTATTGGCAAAATTCA
AGACTCACTTTCTTCCACAGCAAGTGCACTTGGAAAACTTCAAGATGTGGTCAAC
CAAAATGCACAAGCTTTAAACACGCTTGTTAAACAACTTAGCTCCAATTTTGGTG
CAATTTCAAGTGTTTTAAATGATATCCTTTCACGTCTTGACAAAGTTGAGGCTGA
AGTGCAAATTGATAGGTTGATCACAGGCAGACTTCAAAGTTTGCAGACATATGTG
ACTCAACAATTAATTAGAGCTGCAGAAATCAGAGCTTCTGCTAATCTTGCTGCTA
CTAAAATGTCAGAGTGTGTACTTGGACAATCAAAAAGAGTTGATTTTTGTGGAAA
GGGCTATCATCTTATGTCCTTCCCTCAGTCAGCACCTCATGGTGTAGTCTTCTTGC
ATGTGACTTATGTCCCTGCACAAGAAAAGAACTTCACAACTGCTCCTGCCATTT
GTCATGATGGAAAAGCACACTTTCCTCGTGAAGGTGTCTTTGTTTCAAATGGCAC
ACACTGGTTTGTAACACAAAGGAATTTTTATGAACCACAAATCATTACTACAGAC
AACACATTTGTGTCTGGTAACTGTGATGTTGTAATAGGAATTGTCAACAACACAG
TTTATGATCCTTTGCAACCTGAATTAGACTCATTCAAGGAGGAGTTAGATAAATA
TTTTAAGAATCATACATCACCAGATGTTGATTTAGGTGACATCTCTGGCATTAAT
GCTTCAGTTGTAAACATTCAAAAAGAAATTGACCGCCTCAATGAGGTTGCCAAG
AATTTAAATGAATCTCTCATCGATCTCCAAGAACTTGGAAAGTATGAGCAGTATA
TAAAATGGCCATGGTACATTTGGCTAGGTTTTATAGCTGGCTTGATTGCCATAGT
AATGGTGACAATTATGCTTTGCTGTATGACCAGTTGCTGTAGTTGTCTCAAGGGC
TGTTGTTCTTGTGGATCCTGCTGCAAATTTGATGAAGACGACTCTGAGCCAGTGC
TCAAAGGAGTCAAATTACATTACACATAAACGAACTTATGGATTTGTTTATGAGA
ATCTTCACAATTGGAACTGTAACTTTGAAGCAAGGTGAAATCAAGGATGCTACTC
CTTCAGATTTTGTTCGCGCTACTGCAACGATACCGATACAAGCCTCACTCCCTTTC
GGATGGCTTATTGTTGGCGTTGCACTTCTTGCTGTTTTTCAGAGCGCTTCCAAAAT
CATAACCCTCAAAAAGAGATGGCAACTAGCACTCTCCAAGGGTGTTCACTTTGTT
TGCAACTTGCTGTTGTTGTTTGTAACAGTTTACTCACACCTTTTGCTCGTTGCTGC
TGGCCTTGAAGCCCCTTTTCTCTATCTTTATGCTTTAGTCTACTTCTTGCAGAGTAT
AAACTTTGTAAGAATAATAATGAGGCTTTGGCTTTGCTGGAAATGCCGTTCCAAA
AACCCATTACTTTATGATGCCAACTATTTTCTTTGCTGGCATACTAATTGTTACGA
CTATTGTATACCTTACAATAGTGTAACTTCTTCAATTGTCATTACTTCAGGTGATG
GCACAACAAGTCCTATTTCTGAACATGACTACCAGATTGGTGGTTATACTGAAAA
ATGGGAATCTGGAGTAAAAGACTGTGTTGTATTACACAGTTACTTCACTTCAGAC
TATTACCAGCTGTACTCAACTCAATTGAGTACAGACACTGGTGTTGAACATGTTA
CCTTCTTCATCTACAATAAAATTGTTGATGAGCCTGAAGAACATGTCCAAATTCA
CACAATCGACGGTTCATCCGGAGTTGTTAATCCAGTAATGGAACCAATTTATGAT
GAACCGACGACGACTACTAGCGTGCCTTTGTAAGCACAAGCTGATGAGTACGAA
CTTATGTACTCATTCGTTTCGGAAGAGACAGGTACGTTAATAGTTAATAGCGTAC
TTCTTTTTCTTGCTTTCGTGGTATTCTTGCTAGTTACACTAGCCATCCTTACTGCGC
TTCGATTGTGTGCGTACTGCTGCAATATTGTTAACGTGAGTCTTGTAAAACCTTCT
TTTTACGTTTACTCTCGTGTTAAAAATCTGAATTCTTCTAGAGTTCCTGATCTTCT
GGTCTAAACGAACTAAATATTATATTAGTTTTTCTGTTTGGAACTTTAATTTTAGC
CATGGCAGATTCCAACGGTACTATTACCGTTGAAGAGCTTAAAAAGCTCCTTGAA
CAATGGAACCTAGTAATAGGTTTCCTATTCCTTACATGGATTTGTCTTCTACAATT
TGCCTATGCCAACAGGAATAGGTTTTTGTATATAATTAAGTTAATTTTCCTCTGGC
TGTTATGGCCAGTAACTTTAGCTTGTTTTGTGCTTGCTGCTGTTTACAGAATAAAT
TGGATCACCGGTGGAATTGCTATCGCAATGGCTTGTCTTGTAGGCTTGATGTGGC
TCAGCTACTTCATTGCTTCTTTCAGACTGTTTGCGCGTACGCGATCCATGTGGTCA
TTCAATCCAGAAACTAACATTCTTCTCAACGTGCCACTCCATGGCACTATTCTGA
CCAGACCGCTTCTAGAAAGTGAACTCGTAATCGGAGCTGTGATCCTTCGTGGACA
TCTTCGTATTGCTGGACACCATCTAGGACGCTGTGACATCAAGGACCTGCCTAAA
GAAATCACTGTTGCTACATCACGAACGCTTTCTTATTACAAATTGGGAGCTTCGC
AGCGTGTAGCAGGTGACTCAGGTTTTGCTGCATACAGTCGCTACAGGATTGGCAA
CTATAAATTAAACACAGACCATTCCAGTAGCAGTGACAATATTGCTTTGCTTGTA
CAGTAAGTGACAACAGATGTTTCATCTCGTTGACTTTCAGGTTACTATAGCAGAG
ATATTACTAATTATTATGAGGACTTTTAAAGTTTCCATTTGGAATCTTGATTACAT
CATAAACCTCATAATTAAAAATTTATCTAAGTCACTAACTGAGAATAAATATTCT
CAATTAGATGAAGAGCAACCAATGGAGATTGATTAAACGAACATGAAAATTATT
CTTTTCTTGGCACTGATAACACTCGCTACTTGTGAGCTTTATCACTACCAAGAGTG
TGTTAGAGGTACAACAGTACTTTTAAAAGAACCTTGCTCTTCTGGAACATACGAG
GGCAATTCACCATTTCATCCTCTAGCTGATAACAAATTTGCACTGACTTGCTTTAG
CACTCAATTTGCTTTTGCTTGTCCTGACGGCGTAAAACACGTCTATCAGTTACGTG
CCAGATCAGTTTCACCTAAACTGTTCATCAGACAAGAGGAAGTTCAAGAACTTTA
CTCTCCAATTTTTCTTATTGTTGCGGCAATAGTGTTTATAACACTTTGCTTCACAC
TCAAAAGAAAGACAGAATGATTGAACTTTCATTAATTGACTTCTATTTGTGCTTTT
TAGCCTTTCTGCTATTCCTTGTTTTAATTATGCTTATTATCTTTTGGTTCTCACTTG
AACTGCAAGATCATAATGAAACTTGTCACGCCTAAACGAACATGAAATTTCTTGT
TTTCTTAGGAATCATCACAACTGTAGCTGCATTTCACCAAGAATGTAGTTTACAG
TCATGTACTCAACATCAACCATATGTAGTTGATGACCCGTGTCCTATTCACTTCTA
TTCTAAATGGTATATTAGAGTAGGAGCTAGAAAATCAGCACCTTTAATTGAATTG
TGCGTGGATGAGGCTGGTTCTAAATCACCCATTCAGTACATCGATATCGGTAATT
ATACAGTTTCCTGTTTACCTTTTACAATTAATTGCCAGGAACCTAAATTGGGTAGT
CTTGTAGTGCGTTGTTCGTTCTATGAAGACTTTTTAGAGTATCATGACGTTCGTGT
TGTTTTAGATTTCATCTAAACGAACAAACTAAAATGTCTGATAATGGACCCCAAA
ATCAGCGAAATGCACCCCGCATTACGTTTGGTGGACCCTCAGATTCAACTGGCAG
TAACCAGAATGGAGAACGCAGTGGGGCGCGATCAAAACAACGTCGGCCCCAAG
GTTTACCCAATAATACTGCGTCTTGGTTCACCGCTCTCACTCAACATGGCAAGGA
AGACCTTAAATTCCCTCGAGGACAAGGCGTTCCAATTAACACCAATAGCAGTCC
AGATGACCAAATTGGCTACTACCGAAGAGCTACCAGACGAATTCGTGGTGGTGA
CGGTAAAATGAAAGATCTCAGTCCAAGATGGTATTTCTACTACCTAGGAACTGG
GCCAGAAGCTGGACTTCCCTATGGTGCTAACAAAGACGGCATCATATGGGTTGC
AACTGAGGGAGCCTTGAATACACCAAAAGATCACATTGGCACCCGCAATCCTGC
TAACAATGCTGCAATCGTGCTACAACTTCCTCAAGGAACAACATTGCCAAAAGG
CTTCTACGCAGAAGGGAGCAGAGGCGGCAGTCAAGCCTCTTCTCGTTCCTCATCA
CGTAGTCGCAACAGTTCAAGAAATTCAACTCCAGGCAGCAGTAGGGGAACTTCT
CCTGCTAGAATGGCTGGCAATGGCGGTGATGCTGCTCTTGCTTTGCTGCTGCTTG
ACAGATTGAACCAGCTTGAGAGCAAAATGTCTGGTAAAGGCCAACAACAACAAG
GCCAAACTGTCACTAAGAAATCTGCTGCTGAGGCTTCTAAGAAGCCTCGGCAAA
AACGTACTGCCACTAAAGCATACAATGTAACACAAGCTTTCGGCAGACGTGGTC
CAGAACAAACCCAAGGAAATTTTGGGGACCAGGAACTAATCAGACAAGGAACT
GATTACAAACATTGGCCGCAAATTGCACAATTTGCCCCCAGCGCTTCAGCGTTCT
TCGGAATGTCGCGCATTGGCATGGAAGTCACACCTTCGGGAACGTGGTTGACCTA
CACAGGTGCCATCAAATTGGATGACAAAGATCCAAATTTCAAAGATCAAGTCAT
TTTGCTGAATAAGCATATTGACGCATACAAAACATTCCCACCAACAGAGCCTAA
AAAGGACAAAAAGAAGAAGGCTGATGAAACTCAAGCCTTACCGCAGAGACAGA
AGAAACAGCAAACTGTGACTCTTCTTCCTGCTGCAGATTTGGATGATTTCTCCAA
ACAATTGCAACAATCCATGAGCAGTGCTGACTCAACTCAGGCCTAAACTCATGC
AGACCACACAAGGCAGATGGGCTATATAAACGTTTTCGCTTTTCCGTTTACGATA
TATAGTCTACTCTTGTGCAGAATGAATTCTCGTAACTACATAGCACAAGTAGATG
TAGTTAACTTTAATCTCACATAGCAATCTTTAATCAGTGTGTAACATTAGGGAGG
ACTTGAAAGAGCCACCACATTTTCACCGAGGCCACGCGGAGTACGATCGAGTGT
ACAGTGAACAATGCTAGGGAGAGCTGCCTATATGGAAGAGCCCTAATGTGTAAA
ATTAATTTTAGTAGTGCTATCCCCATGTGATTTTAATAGCTTCTTAGGAGAATGAC
AAAAAAAAAAAAAAAAAAAAAAAAAAAAAAAAAAAAAAAAAAAAAAAAAAAA
AAAAAAAGGGTCGGCATGGCATCTCCACCTCCTCGCGGTCCGACCTGGGCATCC
GAAGGAGGACGCACGTCCACTCGGATGGCTAAGGGAGCAGCACACTGGCGGCC
GTTACTAGGGCCGCGCCCTTCCCAACAGTTGCGCAGCCTGAATGGCGAATGGAG
ATCCAATTTTTAAGTGTATAATGTGTTAAACTACTGATTCTAATTGTTTGTGTATT
TTAGATTCACAGTCCCAAGGCTCATTTCAGGCCCCTCAGTCCTCACAGTCTGTTC
ATGATCATAATCAGCCATACCACATTTGTAGAGGTTTTACTTGCTTTAAAAAACC
TCCCACACCTCCCCCTGAACCTGAAACATAAAATGAATGCAATTGTTGTTGTTAA
CTTGTTTATTGCAGCTTATAATGGTTACAAATAAAGCAATAGCATCACAAATTTC
ACAAATAAAGCATTTTTTTCACTGCATTCTAGTTGTGGTTTGTCCAAACTCATCAA
TGTATCTTAAAGCTTGAGTATTCTATAGTCTCACCTAAATAGCTTGGCGTAATCAT
GGTCATAGCTGTTTCCTGTGTGAAATTGTTATCCGCTCACAATTCCACACAACAT
ACGAGCCGGAAGCATAAAGTGTAAAGCCTGGGGTGCCTAATGAGTGAGCTAACT
CACATTAATTGCGTTGCGCTCACTGCCCGCTTTCCAGTCGGGAAACCTGTCGTGC
CAGCTGCATTAATGAATCGGCCAACGCGAACCCCTTGCGGCCGCCCGGGCCGTC
GACCAATTCTCATGTTTGACAGCTTATCATCGAATTTCTGCCATTCATCCGCTTAT
TATCACTTATTCAGGCGTAGCAACCAGGCGTTTAAGGGCACCAATAACTGCCTTA
AAAAAATTACGCCCCGCCCTGCCACTCATCGCAGTACTGTTGTAATTCATTAAGC
ATTCTGCCGACATGGAAGCCATCACAAACGGCATGATGAACCTGAATCGCCAGC
GGCATCAGCACCTTGTCGCCTTGCGTATAATATTTGCCCATGGTGAAAACGGGGG
CGAAGAAGTTGTCCATATTGGCCACGTTTAAATCAAAACTGGTGAAACTCACCCA
GGGATTGGCTGAGACGAAAAACATATTCTCAATAAACCCTTTAGGGAAATAGGC
CAGGTTTTCACCGTAACACGCCACATCTTGCGAATATATGTGTAGAAACTGCCGG
AAATCGTCGTGGTATTCACTCCAGAGCGATGAAAACGTTTCAGTTTGCTCATGGA
AAACGGTGTAACAAGGGTGAACACTATCCCATATCACCAGCTCACCGTCTTTCAT
TGCCATACGAAATTCCGGATGAGCATTCATCAGGCGGGCAAGAATGTGAATAAA
GGCCGGATAAAACTTGTGCTTATTTTTCTTTACGGTCTTTAAAAAGGCCGTAATAT
CCAGCTGAACGGTCTGGTTATAGGTACATTGAGCAACTGACTGAAATGCCTCAA
AATGTTCTTTACGATGCCATTGGGATATATCAACGGTGGTATATCCAGTGATTTTT
TTCTCCATTTTAGCTTCCTTAGCTCCTGAAAATCTCGATAACTCAAAAAATACGCC
CGGTAGTGATCTTATTTCATTATGGTGAAAGTTGGAACCTCTTACGTGCCGATCA
ACGTCTCATTTTCGCCAAAAGTTGGCCCAGGGCTTCCCGGTATCAACAGGGACAC
CAGGATTTATTTATTCTGCGAAGTGATCTTCCGTCACAGGTATTTATTCGCGATAA
GCTCATGGAGCGGCGTAACCGTCGCACAGGAAGGACAGAGAAAGCGCGGATCT
GGGAAGTGACGGACAGAACGGTCAGGACCTGGATTGGGGAGGCGGTTGCCGCC
GCTGCTGCTGACGGTGTGACGTTCTCTGTTCCGGTCACACCACATACGTTCCGCC
ATTCCTATGCGATGCACATGCTGTATGCCGGTATACCGCTGAAAGTTCTGCAAAG
CCTGATGGGACATAAGTCCATCAGTTCAACGGAAGTCTACACGAAGGTTTTTGCG
CTGGATGTGGCTGCCCGGCACCGGGTGCAGTTTGCGATGCCGGAGTCTGATGCG
GTTGCGATGCTGAAACAATTATCCTGAGAATAAATGCCTTGGCCTTTATATGGAA
ATGTGGAACTGAGTGGATATGCTGTTTTTGTCTGTTAAACAGAGAAGCTGGCTGT
TATCCACTGAGAAGCGAACGAAACAGTCGGGAAAATCTCCCATTATCGTAGAGA
TCCGCATTATTAATCTCAGGAGCCTGTGTAGCGTTTATAGGAAGTAGTGTTCTGT
CATGATGCCTGCAAGCGGTAACGAAAACGATTTGAATATGCCTTCAGGAACAAT
AGAAATCTTCGTGCGGTGTTACGTTGAAGTGGAGCGGATTATGTCAGCAATGGAC
AGAACAACCTAATGAACACAGAACCATGATGTGGTCTGTCCTTTTACAGCCAGTA
GTGCTCGCCGCAGTCGAGCGACAGGGCGAAGCCCTCGGCTGGTTGCCCTCGCCG
CTGGGCTGGCGGCCGTCTATGGCCCTGCAAACGCGCCAGAAACGCCGTCGAAGC
CGTGTGCGAGACACCGCGGCCGGCCGCCGGCGTTGTGGATACCTCGCGGAAAAC
TTGGCCCTCACTGACAGATGAGGGGCGGACGTTGACACTTGAGGGGCCGACTCA
CCCGGCGCGGCGTTGACAGATGAGGGGCAGGCTCGATTTCGGCCGGCGACGTGG
AGCTGGCCAGCCTCGCAAATCGGCGAAAACGCCTGATTTTACGCGAGTTTCCCAC
AGATGATGTGGACAAGCCTGGGGATAAGTGCCCTGCGGTATTGACACTTGAGGG
GCGCGACTACTGACAGATGAGGGGCGCGATCCTTGACACTTGAGGGGCAGAGTG
CTGACAGATGAGGGGCGCACCTATTGACATTTGAGGGGCTGTCCACAGGCAGAA
AATCCAGCATTTGCAAGGGTTTCCGCCCGTTTTTCGGCCACCGCTAACCTGTCTTT
TAACCTGCTTTTAAACCAATATTTATAAACCTTGTTTTTAACCAGGGCTGCGCCCT
GTGCGCGTGACCGCGCACGCCGAAGGGGGGTGCCCCCCCTTCTCGAACCCTCCC
GGTCGAGTGAGCGAGGAAGCACCAGGGAACAGCACTTATATATTCTGCTTACAC
ACGATGCCTGAAAAAACTTCCCTTGGGGTTATCCACTTATCCACGGGGATATTTT
TATAATTATTTTTTTTATAGTTTTTAGATCTTCTTTTTTAGAGCGCCTTGTAGGCCT
TTATCCATGCTGGTTCTAGAGAAGGTGTTGTGACAAATTGCCCTTTCAGTGTGAC
AAATCACCCTCAAATGACAGTCCTGTCTGTGACAAATTGCCCTTAACCCTGTGAC
AAATTGCCCTCAGAAGAAGCTGTTTTTTCACAAAGTTATCCCTGCTTATTGACTCT
TTTTTATTTAGTGTGACAATCTAAAAACTTGTCACACTTCACATGGATCTGTCATG
GCGGAAACAGCGGTTATCAATCACAAGAAACGTAAAAATAGCCCGCGAATCGTC
CAGTCAAACGACCTCACTGAGGCGGCATATAGTCTCTCCCGGGATCAAAAACGT
ATGCTGTATCTGTTCGTTGACCAGATCAGAAAATCTGATGGCACCCTACAGGAAC
ATGACGGTATCTGCGAGATCCATGTTGCTAAATATGCTGAAATATTCGGATTGAC
CTCTGCGGAAGCCAGTAAGGATATACGGCAGGCATTGAAGAGTTTCGCGGGGAA
GGAAGTGGTTTTTTATCGCCCTGAAGAGGATGCCGGCGATGAAAAAGGCTATGA
ATCTTTTCCTTGGTTTATCAAACGTGCGCACAGTCCATCCAGAGGGCTTTACAGT
GTACATATCAACCCATATCTCATTCCCTTCTTTATCGGGTTACAGAACCGGTTTAC
GCAGTTTCGGCTTAGTGAAACAAAAGAAATCACCAATCCGTATGCCATGCGTTTA
TACGAATCCCTGTGTCAGTATCGTAAGCCGGATGGCTCAGGCATCGTCTCTCTGA
AAATCGACTGGATCATAGAGCGTTACCAGCTGCCTCAAAGTTACCAGCGTATGCC
TGACTTCCGCCGCCGCTTCCTGCAGGTCTGTGTTAATGAGATCAACAGCAGAACT
CCAATGCGCCTCTCATACATTGAGAAAAAGAAAGGCCGCCAGACGACTCATATC
GTATTTTCCTTCCGCGATATCACTTCCATGACGACAGGATAGTCTGAGGGTTATC
TGTCACAGATTTGAGGGTGGTTCGTCACATTTGTTCTGACCTACTGAGGGTAATTT
GTCACAGTTTTGCTGTTTCCTTCAGCCTGCATGGATTTTCTCATACTTTTTGAACT
GTAATTTTTAAGGAAGCCAAATTTGAGGGCAGTTTGTCACAGTTGATTTCCTTCTC
TTTCCCTTCGTCATGTGACCTGATATCGGGGGTTAGTTCGTCATCATTGATGAGGG
TTGATTATCACAGTTTATTACTCTGAATTGGCTATCCGCGTGTGTACCTCTACCTG
GAGTTTTTCCCACGGTGGATATTTCTTCTTGCGCTGAGCGTAAGAGCTATCTGAC
AGAACAGTTCTTCTTTGCTTCCTCGCCAGTTCGCTCGCTATGCTCGGTTACACGGC
TGCGGCG
SEQ ID NO: 68 - Clone pCCI-4K-SARS-COV-2-7N-1-delta, with notable
sequences underlined or otherwise identified (eg. restriction enzyme sites, nucelotide
differences):
GATGTGCTGCAAGGCGATTAAGTTGGGTAACGCCAGGGTTTTCCCAGT
CACGACGTTGTAAAACGACGGCCAGTGAATTGTAATACGACTCACTATAGGGCG
AATTCTAGTTATTAATAGTAATCAATTACGGGGTCATTAGTTCATAGCCCATATA
TGGAGTTCCGCGTTACATAACTTACGGTAAATGGCCCGCCTGGCTGACCGCCCAA
CGACCCCCGCCCATTGACGTCAATAATGACGTATGTTCCCATAGTAACGCCAATA
GGGACTTTCCATTGACGTCAATGGGTGGAGTATTTACGGTAAACTGCCCACTTGG
CAGTACATCAAGTGTATCATATGCCAAGTACGCCCCCTATTGACGTCAATGACGG
TAAATGGCCCGCCTGGCATTATGCCCAGTACATGACCTTATGGGACTTTCCTACT
TGGCAGTACATCTACGTATTAGTCATCGCTATTACCATGGTGATGCGGTTTTGGC
AGTACATCAATGGGCGTGGATAGCGGTTTGACTCACGGGGATTTCCAAGTCTCCA
CCCCATTGACGTCAATGGGAGTTTGTTTTGGCACCAAAATCAACGGGACTTTCCA
AAATGTCGTAACAACTCCGCCCCATTGACGCAAATGGGCGGTAGGCGTGTACGG
TGGGAGGTCTATATAAGCAGAGCTGGTTTAGTGAACCGTATTAAAGGTTTATACC
TTCCCAGGTAACAAACCAACCAACTTTCGATCTCTTGTAGATCTGTTCTCTAAAC
GAACTTTAAAATCTGTGTGGCTGTCACTCGGCTGCATGCTTAGTGCACTCACGCA
GTATAATTAATAACTAATTACTGTCGTTGACAGGACACGAGTAACTCGTCTATCT
TCTGCAGGCTGCTTACGGTTTCGTCCGTGTTGCAGCCGATCATCAGCACATCTAG
GTTTCGTCCGGGTGTGACCGAAAGGTAAGATGGAGAGCCTTGTCCCTGGTTTCAA
CGAGAAAACACACGTCCAACTCAGTTTGCCTGTTTTACAGGTTCGCGACGTGCTC
GTACGTGGCTTTGGAGACTCCGTGGAGGAGGTCTTATCAGAGGCACGTCAACAT
CTTAAAGATGGCACTTGTGGCTTAGTAGAAGTTGAAAAAGGCGTTTTGCCTCAAC
TTGAACAGCCCTATGTGTTCATCAAACGTTCGGATGCTCGAACTGCACCTCATGG
TCATGTTATGGTTGAGCTGGTAGCAGAACTCGAAGGCATTCAGTACGGTCGTAGT
GGTGAGACACTTGGTGTCCTTGTCCCTCATGTGGGCGAAATACCAGTGGCTTACC
GCAAGGTTCTTCTTCGTAAGAACGGTAATAAAGGAGCTGGTGGCCATAGTTACG
GCGCCGATCTAAAGTCATTTGACTTAGGCGACGAGCTTGGCACTGATCCTTATGA
AGATTTTCAAGAAAACTGGAACACTAAACATAGCAGTGGTGTTACCCGTGAACT
CATGCGTGAGCTTAACGGAGGGGCATACACTCGCTATGTCGATAACAACTTCTGT
GGCCCTGATGGCTACCCTCTTGAGTGCATTAAAGACCTTCTAGCACGTGCTGGTA
AAGCTTCATGCACTTTGTCCGAACAACTGGACTTTATTGACACTAAGAGGGGTGT
ATACTGCTGCCGTGAACATGAGCATGAAATTGCTTGGTACACGGAACGTTCTGAA
AAGAGCTATGAATTGCAGACACCTTTTGAAATTAAATTGGCAAAGAAATTTGAC
ACCTTCAATGGGGAATGTCCAAATTTTGTATTTCCCTTAAATTCCATAATCAAGA
CTATTCAACCAAGGGTTGAAAAGAAAAAGCTTGATGGCTTTATGGGTAGAATTC
GATCTGTCTATCCAGTTGCGTCACCAAATGAATGCAACCAAATGTGCCTTTCAAC
TCTCATGAAGTGTGATCATTGTGGTGAAACTTCATGGCAGACGGGCGATTTTGTT
AAAGCCACTTGCGAATTTTGTGGCACTGAGAATTTGACTAAAGAAGGTGCCACT
ACTTGTGGTTACTTACCCCAAAATGCTGTTGTTAAAATTTATTGTCCAGCATGTCA
CAATTCAGAAGTAGGACCTGAGCATAGTCTTGCCGAATACCATAATGAATCTGG
CTTGAAAACCATTCTTCGTAAGGGTGGTCGCACTATTGCCTTTGGAGGCTGTGTG
TTCTCTTATGTTGGTTGCCATAACAAGTGTGCCTATTGGGTCCCACGTGCTAGCG
CTAACATAGGTTGTAACCATACAGGTGTTGTTGGAGAAGGTTCCGAAGGTCTTAA
TGACAACCTTCTTGAAATACTCCAAAAAGAGAAAGTCAACATCAATATTGTTGGT
GACTTTAAACTTAATGAAGAGATCGCCATTATTTTGGCATCTTTTTCTGCTTCCAC
AAGTGCTTTTGTGGAAACTGTGAAAGGTTTGGATTATAAAGCATTCAAACAAATT
GTTGAATCCTGTGGTAATTTTAAAGTTACAAAAGGAAAAGCTAAAAAAGGTGCC
TGGAATATTGGTGAACAGAAATCAATACTGAGTCCTCTTTATGCATTTGCATCAG
AGGCTGCTCGTGTTGTACGATCAATTTTCTCCCGCACTCTTGAAACTGCTCAAAA
TTCTGTGCGTGTTTTACAGAAGGCCGCTATAACAATACTAGATGGAATTTCACAG
TATTCACTGAGACTCATTGATGCTATGATGTTCACATCTGATTTGGCTACTAACAA
TCTAGTTGTAATGGCCTACATTACAGGTGGTGTTGTTCAGTTGACTTCGCAGTGG
CTAACTAACATCTTTGGCACTGTTTATGAAAAACTCAAACCCGTCCTTGATTGGC
TTGAAGAGAAGTTTAAGGAAGGTGTAGAGTTTCTTAGAGACGGTTGGGAAATTG
TTAAATTTATCTCAACCTGTGCTTGTGAAATTGTCGGTGGACAAATTGTCACCTGT
GCAAAGGAAATTAAGGAGAGTGTTCAGACATTCTTTAAGCTTGTAAATAAATTTT
TGGCTTTGTGTGCTGACTCTATCATTATTGGTGGAGCTAAACTTAAAGCCTTGAAT
TTAGGTGAAACATTTGTCACGCACTCAAAGGGATTGTACAGAAAGTGTGTTAAAT
CCAGAGAAGAAACTGGCCTACTCATGCCTCTAAAAGCCCCAAAAGAAATTATCT
TCTTAGAGGGAGAAACACTTCCCACAGAAGTGTTAACAGAGGAAGTTGTCTTGA
AAACTGGTGATTTACAACCATTAGAACAACCTACTAGTGAAGCTGTTGAAGCTCC
ATTGGTTGGTACACCAGTTTGTATTAACGGGCTTATGTTGCTCGAAATCAAAGAC
ACAGAAAAGTACTGTGCCCTTGCACCTAATATGATGGTAACAAACAATACCTTCA
CACTCAAAGGCGGTGCACCAACAAAGGTTACTTTTGGTGATGACACTGTGATAG
AAGTGCAAGGTTACAAGAGTGTGAATATCACTTTTGAACTTGATGAAAGGATTG
ATAAAGTACTTAATGAGAAGTGCTCTGCCTATACAGTTGAACTCGGTACAGAAGT
AAATGAGTTCGCCTGTGTTGTGGCAGATGCTGTCATAAAAACTTTGCAACCAGTA
TCTGAATTACTTACACCACTGGGCATTGATTTAGATGAGTGGAGTATGGCTACAT
ACTACTTATTTGATGAGTCTGGTGAGTTTAAATTGGCTTCACATATGTATTGTTCT
TTCTACCCTCCAGATGAGGATGAAGAAGAAGGTGATTGTGAAGAAGAAGAGTTT
GAGCCATCAACTCAATATGAGTATGGTACTGAAGATGATTACCAAGGTAAACCT
TTGGAATTTGGTGCCACTTCTGCTGCTCTTCAACCTGAAGAAGAGCAAGAAGAAG
ATTGGTTAGATGATGATAGTCAACAAACTGTTGGTCAACAAGACGGCAGTGAGG
ACAATCAGACAACTACTATTCAAACAATTGTTGAGGTTCAACCTCAATTAGAGAT
GGAACTTACACCAGTTGTTCAGACTATTGAAGTGAATAGTTTTAGTGGTTATTTA
AAACTTACTGACAATGTATACATTAAAAATGCAGACATTGTGGAAGAAGCTAAA
AAGGTAAAACCAACAGTGGTTGTTAATGCAGCCAATGTTTACCTTAAACATGGA
GGAGGTGTTGCAGGAGCCTTAAATAAGGCTACTAACAATGCCATGCAAGTTGAA
TCTGATGATTACATAGCTACTAATGGACCACTTAAAGTGGGTGGTAGTTGTGTTT
TAAGCGGACACAATCTTGCTAAACACTGTCTTCATGTTGTCGGCCCAAATGTTAA
CAAAGGTGAAGACATTCAACTTCTTAAGAGTGCTTATGAAAATTTTAATCAGCAC
GAAGTTCTACTTGCACCATTATTATCAGCTGGTATTTTTGGTGCTGACCCTATACA
TTCTTTAAGAGTTTGTGTAGATACTGTTCGCACAAATGTCTACTTAGCTGTCTTTG
ATAAAAATCTCTATGACAAACTTGTTTCAAGCTTTTTGGAAATGAAGAGTGAAAA
GCAAGTTGAACAAAAGATCGCTGAGATTCCTAAAGAGGAAGTTAAGCCATTTAT
AACTGAAAGTAAACCTTCAGTTGAACAGAGAAAACAAGATGATAAGAAAATCA
AAGCTTGTGTTGAAGAAGTTACAACAACTCTGGAAGAAACTAAGTTCCTCACAG
AAAACTTGTTACTTTATATTGACATTAATGGCAATCTTCATCCAGATTCTGCCACT
CTTGTTAGTGACATTGACATCACTTTCTTAAAGAAAGATGCTCCATATATAGTGG
GTGATGTTGTTCAAGAGGGTGTTTTAACTGCTGTGGTTATACCTACTAAAAAGGC
TGGTGGCACTACTGAAATGCTAGCGAAAGCTTTGAGAAAAGTGCCAACAGACAA
TTATATAACCACTTACCCGGGTCAGGGTTTAAATGGTTACACTGTAGAGGAGGC
AAAGACAGTGCTTAAAAAGTGTAAAAGTGCCTTTTACATTCTACCATCTATTATC
TCTAATGAGAAGCAAGAAATTCTTGGAACTGTTTCTTGGAATTTGCGAGAAATGC
TTGCACATGCAGAAGAAACACGCAAATTAATGCCTGTCTGTGTGGAAACTAAAG
CCATAGTTTCAACTATACAGCGTAAATATAAGGGTATTAAAATACAAGAGGGTG
TGGTTGATTATGGTGCTAGATTTTACTTTTACACCAGTAAAACAACTGTAGCGTC
ACTTATCAACACACTTAACGATCTAAATGAAACTCTTGTTACAATGCCACTTGGC
TATGTAACACATGGCTTAAATTTGGAAGAAGCTGCTCGGTATATGAGATCTCTCA
AAGTGCCAGCTACAGTTTCTGTTTCTTCACCTGATGCTGTTACAGCGTATAATGGT
TATCTTACTTCTTCTTCTAAAACACCTGAAGAACATTTTATTGAAACCATCTCACT
TGCTGGTTCCTATAAAGATTGGTCCTATTCTGGACAATCTACACAACTAGGTATA
GAATTTCTTAAGAGAGGTGATAAAAGTGTATATTACACTAGTAATCCTACCACAT
TCCACCTAGATGGTGAAGTTATCACCTTTGACAATCTTAAGACACTTCTTTCTTTG
AGAGAAGTGAGGACTATTAAGGTGTTTACAACAGTAGACAACATTAACCTCCAC
ACGCAAGTTGTGGACATGTCAATGACATATGGACAACAGTTTGGTCCAACTTATT
TGGATGGAGCTGATGTTACTAAAATAAAACCTCATAATTCACATGAAGGTAAAA
CATTTTATGTTTTACCTAATGATGACACTCTACGTGTTGAGGCTTTTGAGTACTAC
CACACAACTGATCCTAGTTTTCTGGGTAGGTACATGTCAGCATTAAATCACACTA
AAAAGTGGAAATACCCACAAGTTAATGGTTTAACTTCTATTAAATGGGCAGATA
ACAACTGTTATCTTGCCACTGCATTGTTAACACTCCAACAAATAGAGTTGAAGTT
TAATCCACCTGCTCTACAAGATGCTTATTACAGAGCAAGGGCTGGTGAAGCTGCT
AACTTTTGTGCACTTATCTTAGCCTACTGTAATAAGACAGTAGGTGAGTTAGGTG
ATGTTAGAGAAACAATGAGTTACTTGTTTCAACATGCCAATTTAGATTCTTGCAA
AAGAGTCTTGAACGTGGTGTGTAAAACTTGTGGACAACAGCAGACAACCCTTAA
GGGTGTAGAAGCTGTTATGTACATGGGCACACTTTCTTATGAACAATTTAAGAAA
GGTGTTCAGATACCTTGTACGTGTGGTAAACAAGCTACAAAATATCTAGTACAAC
AGGAGTCACCTTTTGTTATGATGTCAGCACCACCTGCTCAGTATGAACTTAAGCA
TGGTACATTTACTTGTGCTAGTGAGTACACTGGTAATTACCAGTGTGGTCACTAT
AAACATATAACTTCTAAAGAAACTTTGTATTGCATAGACGGTGCTTTACTTACAA
AGTCCTCAGAATACAAAGGTCCTATTACGGATGTTTTCTACAAAGAAAACAGTTA
CACAACAACCATAAAACCAGTTACTTATAAATTGGATGGTGTTGTTTGTACAGAA
ATTGACCCTAAGTTGGACAATTATTATAAGAAAGACAATTCTTATTTCACAGAGC
AACCAATTGATCTTGTACCAAACCAACCATATCCAAACGCAAGCTTCGATAATTT
TAAGTTTGTATGTGATAATATCAAATTTGCTGATGATTTAAACCAGTTAACTGGTT
ATAAGAAACCTGCTTCAAGAGAGCTTAAAGTTACATTTTTCCCTGACTTAAATGG
TGATGTGGTGGCTATTGATTATAAACACTACACACCCTCTTTTAAGAAAGGAGCT
AAATTGTTACATAAACCTATTGTTTGGCATGTTAACAATGCAACTAATAAAGCCA
CGTATAAACCAAATACCTGGTGTATACGTTGTCTTTGGAGCACAAAACCAGTTGA
AACATCAAATTCGTTTGATGTACTGAAGTCAGAGGACGCGCAGGGAATGGATAA
TCTTGCCTGCGAAGATCTAAAACCAGTCTCTGAAGAAGTAGTGGAAAATCCTACC
ATACAGAAAGACGTTCTTGAGTGTAATGTGAAAACTACCGAAGTTGTAGGAGAC
ATTATACTTAAACCAGCAAATAATAGTTTAAAAATTACAGAAGAGGTTGGCCAC
ACAGATCTAATGGCTGCTTATGTAGACAATTCTAGTCTTACTATTAAGAAACCTA
ATGAATTATCTAGAGTATTAGGTTTGAAAACCCTTGCTACTCATGGTTTAGCTGCT
GTTAATAGTGTCCCTTGGGATACTATAGCTAATTATGCTAAGCCTTTTCTTAACAA
AGTTGTTAGTACAACTACTAACATAGTTACACGGTGTTTAAACCGTGTTTGTACT
AATTATATGCCTTATTTCTTTACTTTATTGCTACAATTGTGTACTTTTACTAGAAGT
ACAAATTCTAGAATTAAAGCATCTATGCCGACTACTATAGCAAAGAATACTGTTA
AGAGTGTCGGTAAATTTTGTCTAGAGGCTTCATTTAATTATTTGAAGTCACCTAAT
TTTTCTAAACTGATAAATATTATAATTTGGTTTTTACTATTAAGTGTTTGCCTAGG
TTCTTTAATCTACTCAACCGCGGCGTTAGGTGTTTTAATGTCTAATTTAGGTATGC
CGTCTTACTGTACGGGTTACCGTGAAGGTTATTTGAACTCTACGAATGTCACGAT
TGCGACGTACTGTACGGGTTCTATACCGTGTAGTGTTTGTCTTAGTGGTTTAGATT
CTTTAGACACGTATCCGTCTTTAGAAACGATACAAATTACGATTTCATCTTTTAAA
TGGGATTTAACGGCGTTTGGTTTAGTTGCGGAGTGGTTTTTGGCGTATATTCTTTT
CACGCGTTTTTTCTATGTACTTGGTTTGGCGGCGATCATGCAATTGTTTTTCAGCT
ATTTTGCGGTACATTTTATTAGTAATTCTTGGCTTATGTGGTTAATAATTAATCTT
GTACAAATGGCGCCGATTTCAGCGATGGTTAGAATGTACATCTTCTTTGCGTCAT
TTTATTATGTATGGAAAAGTTATGTGCATGTTGTAGACGGTTGTAATTCATCAAC
GTGTATGATGTGTTACAAACGTAATAGAGCGACGCGTGTCGAATGTACGACGATT
GTTAATGGTGTTAGACGTTCCTTTTATGTCTATGCGAATGGTGGTAAAGGTTTTTG
CAAACTACACAATTGGAATTGTGTTAATTGTGATACGTTCTGTGCGGGTAGTACG
TTTATTAGTGATGAAGTTGCGCGTGACTTGTCACTACAGTTTAAACGTCCGATAA
ATCCGACGGACCAGTCTTCTTACATCGTTGATAGTGTTACGGTGAAGAATGGTTC
CATCCATCTTTACTTTGATAAAGCGGGTCAAAAGACGTATGAACGTCATTCTCTC
TCTCATTTTGTTAACTTAGACAACCTGCGTGCGAATAACACGAAAGGTTCATTGC
CGATTAATGTTATAGTTTTTGATGGTAAATCAAAATGTGAAGAATCATCTGCGAA
ATCAGCGTCTGTTTACTACAGTCAGCTTATGTGTCAACCGATACTGTTACTAGAT
CAGGCGTTAGTGTCTGATGTTGGTGATAGTGCGGAAGTTGCGGTTAAAATGTTTG
ATGCGTACGTTAATACGTTTTCATCAACGTTTAACGTACCGATGGAAAAACTCAA
AACGCTAGTTGCGACGGCGGAAGCGGAACTTGCGAAGAATGTGTCCTTAGACAA
TGTCTTATCTACGTTTATTTCAGCGGCGCGTCAAGGTTTTGTTGATTCAGATGTAG
AAACGAAAGATGTTGTTGAATGTCTTAAATTGTCACATCAATCTGACATAGAAGT
TACGGGTGATAGTTGTAATAACTATATGCTCACGTATAACAAAGTTGAAAACATG
ACGCCGCGTGACCTTGGTGCGTGTATTGACTGTAGTGCGCGTCATATTAATGCGC
AGGTAGCGAAAAGTCACAACATTGCGTTGATATGGAACGTTAAAGATTTCATGTC
ATTGTCTGAACAACTACGTAAACAAATACGTAGTGCGGCGAAAAAGAATAACTT
ACCGTTTAAGTTGACGTGTGCGACGACGCGTCAAGTTGTTAATGTTGTAACGACG
AAGATAGCGCTTAAGGGTGGTAAAATTGTTAATAATTGGTTGAAGCAATTAATT
AAAGTTACACTTGTGTTCCTTTTTGTTGCTGCTATTTTCTATTTAATAACACCTGTT
CATGTCATGTCTAAACATACTGACTTTTCAAGTGAAATCATAGGATACAAGGCTA
TTGATGGTGGTGTCACTCGTGACATAGCATCTACAGATACTTGTTTTGCTAACAA
ACATGCTGATTTTGACACATGGTTTAGCCAGCGTGGTGGTAGTTATACTAATGAC
AAAGCTTGCCCATTGATTGCTGCAGTCATAACAAGAGAAGTGGGTTTTGTCGTGC
CTGGTTTGCCTGGCACGATATTACGCACAACTAATGGTGACTTTTTGCATTTCTTA
CCTAGAGTTTTTAGTGCAGTTGGTAACATCTGTTACACACCATCAAAACTTATAG
AGTACACTGACTTTGCAACATCAGCTTGTGTTTTGGCTGCTGAATGTACAATTTTT
AAAGATGCTTCTGGTAAGCCAGTACCATATTGTTATGATACCAATGTACTAGAAG
GTTCTGTTGCTTATGAAAGTTTACGCCCTGACACACGTTATGTGCTCATGGATGG
CTCTATTATTCAATTTCCTAACACCTACCTTGAAGGTTCTGTTAGAGTGGTAACAA
CTTTTGATTCTGAGTACTGTAGGCACGGCACTTGTGAAAGATCAGAAGCTGGTGT
TTGTGTATCTACTAGTGGTAGATGGGTACTTAACAATGATTATTACAGATCTTTAC
CAGGAGTTTTCTGTGGTGTAGATGCTGTAAATTTACTTACTAATATGTTTACACCA
CTAATTCAACCTATTGGTGCTTTGGACATATCAGCATCTATAGTAGCTGGTGGTA
TTGTAGCTATCGTAGTAACATGCCTTGCCTACTATTTTATGAGGTTTAGAAGAGCT
TTTGGTGAATACAGTCATGTAGTTGCCTTTAATACTTTACTATTCCTTATGTCATT
CACTGTACTCTGTTTAACACCAGTTTACTCATTCTTACCTGGTGTTTATTCTGTTAT
TTACTTGTACTTGACATTTTATCTTACTAATGATGTTTCTTTTTTAGCACATATTCA
GTGGATGGTTATGTTCACACCTTTAGTACCTTTCTGGATAACAATTGCTTATATCA
TTTGTATTTCCACAAAGCATTTCTATTGGTTCTTTAGTAATTACCTAAAGAGACGT
GTAGTCTTTAATGGTGTTTCCTTTAGTACTTTTGAAGAAGCTGCGCTGTGCACCTT
TTTGTTAAATAAAGAAATGTATCTAAAGTTGCGTAGTGATGTGCTATTACCTCTT
ACGCAATATAATAGATACTTAGCTCTTTATAATAAGTACAAGTATTTTAGTGGAG
CAATGGATACAACTAGCTACAGAGAAGCTGCTTGTTGTCATCTCGCAAAGGCTCT
CAATGACTTCAGTAACTCAGGTTCTGATGTTCTTTACCAACCACCACAAACCTCT
ATCACCTCAGCTGTTTTGCAGAGTGGTTTTAGAAAAATGGCATTCCCATCTGGTA
AAGTTGAGGGTTGTATGGTACAAGTAACTTGTGGTACAACTACACTTAACGGTCT
TTGGCTTGATGACGTAGTTTACTGTCCAAGACATGTGATCTGCACCTCTGAAGAC
ATGCTTAACCCTAATTATGAAGATTTACTCATTCGTAAGTCTAATCATAATTTCTT
GGTACAGGCTGGTAATGTTCAACTCAGGGTTATTGGACATTCTATGCAAAATTGT
GTACTTAAGCTTAAGGTTGATACAGCCAATCCTAAGACACCTAAGTATAAGTTTG
TTCGCATTCAACCAGGACAGACTTTTTCAGTGTTAGCTTGTTACAATGGTTCACC
ATCTGGTGTTTACCAATGTGCTATGAGGCCCAATTTCACTATTAAGGGTTCATTCC
TTAATGGTTCATGTGGTAGTGTTGGTTTTAACATAGATTATGACTGTGTCTCTTTT
TGTTACATGCACCATATGGAATTACCAACTGGAGTTCATGCTGGCACAGACTTAG
AAGGTAACTTTTATGGACCTTTTGTTGACAGGCAAACAGCACAAGCAGCTGGTAC
GGACACAACTATTACAGTTAATGTTTTAGCTTGGTTGTACGCTGCTGTTATAAAT
GGAGACAGGTGGTTTCTCAATCGATTTACCACAACTCTTAATGACTTTAACCTTG
TGGCTATGAAGTACAATTATGAACCTCTAACACAAGACCATGTTGACATACTAGG
ACCTCTTTCTGCTCAAACTGGAATTGCCGTTTTAGATATGTGTGCTTCATTAAAAG
AATTACTGCAAAATGGTATGAATGGACGTACCATATTGGGTAGTGCTTTATTAGA
AGATGAATTTACACCTTTTGATGTTGTTAGACAATGCTCAGGTGTTACTTTCCAAA
GTGCAGTGAAAAGAACAATCAAGGGTACACACCACTGGTTGTTACTCACAATTTT
GACTTCACTTTTAGTTTTAGTCCAGAGTACTCAATGGTCTTTGTTCTTTTTTTTGTA
TGAAAATGCCTTTTTACCTTTTGCTATGGGTATTATTGCTATGTCTGCTTTTGCAA
TGATGTTTGTCAAACATAAGCATGCATTTCTCTGTTTGTTTTTGTTACCTTCTCTTG
CCACTGTAGCTTATTTTAATATGGTCTATATGCCTGCTAGTTGGGTGATGCGTATT
ATGACATGGTTGGATATGGTTGATACTAGTTTGTCTGGTTTTAAGCTAAAAGACT
GTGTTATGTATGCATCAGCTGTAGTGTTACTAATCCTTATGACAGCAAGAACTGT
GTATGATGATGGTGCTAGGAGAGTGTGGACACTTATGAATGTCTTGACACTCGTT
TATAAAGTTTATTATGGTAATGCTTTAGATCAAGCCATTTCCATGTGGGCTCTTAT
AATCTCTGTTACTTCTAACTACTCAGGTGTAGTTACAACTGTCATGTTTTTGGCCA
GAGGTATTGTTTTTATGTGTGTTGAGTATTGCCCTATTTTCTTCATAACTGGTAAT
ACACTTCAGTGTATAATGCTAGTTTATTGTTTCTTAGGCTATTTTTGTACTTGTTAC
TTTGGCCTCTTTTGTTTACTCAACCGCTACTTTAGACTGACTCTTGGTGTTTATGAT
TACTTAGTTTCTACACAGGAGTTTAGATATATGAATTCACAGGGACTACTCCCAC
CCAAGAATAGCATAGATGCCTTCAAACTCAACATTAAATTGTTGGGTGTTGGTGG
CAAACCTTGTATCAAAGTAGCCACTGTACAGTCTAAAATGTCAGATGTAAAGTGC
ACATCAGTAGTCTTACTCTCAGTTTTGCAACAACTCAGAGTAGAATCATCATCTA
AATTGTGGGCTCAATGTGTCCAGTTACACAATGACATTCTCTTAGCTAAAGATAC
TACTGAAGCCTTTGAAAAAATGGTTTCACTACTTTCTGTTTTGCTTTCCATGCAGG
GTGCTGTAGACATAAACAAGCTTTGTGAAGAAATGCTGGACAACAGGGCAACCT
TACAAGCTATAGCCTCAGAGTTTAGTTCCCTTCCATCATATGCAGCTTTTGCTACT
GCTCAAGAAGCTTATGAGCAGGCTGTTGCTAATGGTGATTCTGAAGTTGTTCTTA
AAAAGTTGAAGAAGTCTTTGAATGTGGCTAAATCTGAATTTGACCGTGATGCAGC
CATGCAACGTAAGTTGGAAAAGATGGCTGATCAAGCTATGACCCAAATGTATAA
ACAGGCTAGATCTGAGGACAAGAGGGCAAAAGTTACTAGTGCTATGCAGACAAT
GCTTTTCACTATGCTTAGAAAGTTGGATAATGATGCACTCAACAACATTATCAAC
AATGCAAGAGATGGTTGTGTTCCCTTGAACATAATACCTCTTACAACAGCAGCCA
AACTAATGGTTGTCATACCAGACTATAACACATATAAAAATACGTGTGATGGTAC
AACATTTACTTATGCATCAGCATTGTGGGAAATCCAACAGGTTGTAGATGCAGAT
AGTAAAATTGTTCAACTTAGTGAAATTAGTATGGACAATTCACCTAATTTAGCAT
GGCCTCTTATTGTAACAGCTTTAAGGGCCAATTCTGCTGTCAAATTACAGAATAA
TGAGCTTAGTCCTGTTGCACTACGACAGATGTCTTGTGCTGCCGGTACTACACAA
ACTGCTTGCACTGATGACAATGCGTTAGCTTACTACAACACAACAAAGGGAGGT
AGGTTTGTACTTGCACTGTTATCCGATTTACAGGATTTGAAATGGGCTAGATTCC
CTAAGAGTGATGGAACTGGTACTATCTATACAGAACTGGAACCACCTTGTAGGTT
TGTTACAGACACACCTAAAGGTCCTAAAGTGAAGTATTTATACTTTATTAAAGGA
TTAAACAACCTAAATAGAGGTATGGTACTTGGTAGTTTAGCTGCCACAGTACGTC
TACAAGCTGGTAATGCAACAGAAGTGCCTGCCAATTCAACTGTATTATCTTTCTG
TGCTTTTGCTGTAGATGCTGCTAAAGCTTACAAAGATTATCTAGCTAGTGGGGGA
CAACCAATCACTAATTGTGTTAAGATGTTGTGTACACACACTGGTACTGGTCAGG
CAATAACAGTTACACCGGAAGCCAATATGGATCAAGAATCCTTTGGTGGTGCAT
CGTGTTGTCTGTACTGCCGTTGCCACATAGATCATCCAAATCCTAAAGGATTTTG
TGACTTAAAAGGTAAGTATGTACAAATACCTACAACTTGTGCTAATGACCCTGTG
GGTTTTACACTTAAAAACACAGTCTGTACCGTCTGCGGTATGTGGAAAGGTTATG
GCTGTAGTTGTGATCAACTCCGCGAACCCATGCTTCAGTCAGCTGATGCACAATC
GTTTTTAAACGGGTTTGCGGTGTAAGTGCAGCCCGTCTTACACCGTGCGGCACAG
GCACTAGTACTGATGTCGTATACAGGGCTTTTGACATCTACAATGATAAAGTAGC
TGGTTTTGCTAAATTCCTAAAAACTAATTGTTGTCGCTTCCAAGAAAAGGACGAA
GATGACAATTTAATTGATTCTTACTTTGTAGTTAAGAGACACACTTTCTCTAACTA
CCAACATGAAGAAACAATTTATAATTTACTTAAGGATTGTCCAGCTGTTGCTAAA
CATGACTTCTTTAAGTTTAGAATAGACGGTGACATGGTACCACATATATCACGTC
AACGTCTTACTAAATACACAATGGCAGACCTCGTCTATGCTTTAAGGCATTTTGA
TGAAGGTAATTGTGACACATTAAAAGAAATACTTGTCACATACAATTGTTGTGAT
GATGATTATTTCAATAAAAAGGACTGGTATGATTTTGTAGAAAACCCAGATATAT
TACGCGTATACGCCAACTTAGGTGAACGTGTACGCCAAGCTTTGTTAAAAACAG
TACAATTCTGTGATGCCATGCGAAATGCTGGTATTGTTGGTGTACTGACATTAGA
TAATCAAGATCTCAATGGTAACTGGTATGATTTCGGTGATTTCATACAAACCACG
CCAGGTAGTGGAGTTCCTGTTGTAGATTCTTATTATTCATTGTTAATGCCTATATT
AACCTTGACCAGGGCTTTAACTGCAGAGTCACATGTTGACACTGACTTAACAAAG
CCTTACATTAAGTGGGATTTGTTAAAATATGACTTCACGGAAGAGAGGTTAAAAC
TCTTTGACCGTTATTTTAAATATTGGGATCAGACATACCACCCAAATTGTGTTAAC
TGTTTGGATGACAGATGCATTCTGCATTGTGCAAACTTTAATGTTTTATTCTCTAC
AGTGTTCCCACCTACAAGTTTTGGACCACTAGTGAGAAAAATATTTGTTGATGGT
GTTCCATTTGTAGTTTCAACTGGATACCACTTCAGAGAGCTAGGTGTTGTACATA
ATCAGGATGTAAACTTACATAGCTCTAGACTTAGTTTTAAGGAATTACTTGTGTA
TGCTGCTGACCCTGCTATGCACGCTGCTTCTGGTAATCTATTACTAGATAAACGC
ACTACGTGCTTTTCAGTAGCTGCACTTACTAACAATGTTGCTTTTCAAACTGTCAA
ACCCGGTAATTTTAACAAAGACTTCTATGACTTTGCTGTGTCTAAGGGTTTCTTTA
AGGAAGGAAGTTCTGTTGAATTAAAACACTTCTTCTTTGCTCAGGATGGTAATGC
TGCTATCAGCGATTATGACTACTATCGTTATAATCTACCAACAATGTGTGATATC
AGACAACTACTATTTGTAGTTGAAGTTGTTGATAAGTACTTTGATTGTTACGATG
GTGGCTGTATTAATGCTAACCAAGTCATCGTCAACAACCTAGACAAATCAGCTGG
TTTTCCATTTAATAAATGGGGTAAGGCTAGACTTTATTATGATTCAATGAGTTATG
AGGATCAAGATGCACTTTTCGCATATACAAAACGTAATGTCATCCCTACTATAAC
TCAAATGAATCTTAAGTATGCCATTAGTGCAAAGAATAGAGCTCGCACCGTAGCT
GGTGTCTCTATCTGTAGTACTATGACCAATAGACAGTTTCATCAAAAATTATTGA
AATCAATAGCCGCCACTAGAGGAGCTACTGTAGTAATTGGAACAAGCAAATTCT
ATGGTGGTTGGCACAACATGTTAAAAACTGTTTATAGTGATGTAGAAAACCCTCA
CCTTATGGGTTGGGATTATCCTAAATGTGATAGAGCCATGCCTAACATGCTTAGA
ATTATGGCCTCACTTGTTCTTGCTCGCAAACATACAACGTGTTGTAGCTTGTCACA
CCGTTTCTATAGATTAGCTAATGAGTGTGCTCAAGTATTGAGTGAAATGGTCATG
TGTGGCGGTTCACTATATGTTAAACCAGGTGGAACCTCATCAGGAGATGCCACA
ACTGCTTATGCTAATAGTGTTTTTAACATTTGTCAAGCTGTCACGGCCAATGTTAA
TGCACTTTTATCTACTGATGGTAACAAAATTGCCGATAAGTATGTCCGCAATTTA
CAACACAGACTTTATGAGTGTCTCTATAGAAATAGAGATGTTGACACAGACTTTG
TGAATGAGTTTTACGCATATTTGCGTAAACATTTCTCAATGATGATACTCTCTGAC
GATGCTGTTGTGTGTTTCAATAGCACTTATGCATCTCAAGGTCTAGTGGCTAGCA
TAAAGAACTTTAAGTCAGTTCTTTATTATCAAAACAATGTTTTTATGTCTGAAGCA
AAATGTTGGACTGAGACTGACCTTACTAAAGGACCTCATGAATTTTGCTCTCAAC
ATACAATGCTAGTTAAACAGGGTGATGATTATGTGTACCTTCCTTACCCAGATCC
ATCAAGAATCCTAGGGGCCGGCTGTTTTGTAGATGATATCGTAAAAACAGATGGT
ACACTTATGATTGAACGGTTCGTGTCTTTAGCTATAGATGCTTACCCACTTACTAA
ACATCCTAATCAGGAGTATGCTGATGTCTTTCATTTGTACTTACAATACATAAGA
AAGCTACATGATGAGTTAACAGGACACATGTTAGACATGTATTCTGTTATGCTTA
CTAATGATAACACTTCAAGGTATTGGGAACCTGAGTTTTATGAGGCTATGTACAC
ACCGCATACAGTCTTACAGGCTGTTGGGGCTTGTGTTCTTTGCAATTCACAGACT
TCATTAAGATGTGGTGCTTGCATACGTAGACCATTCTTATGTTGTAAATGCTGTTA
CGACCATGTCATATCAACATCACATAAATTAGTCTTGTCTGTTAATCCGTATGTTT
GCAATGCTCCAGGTTGTGATGTCACAGATGTGACTCAACTTTACTTAGGAGGTAT
GAGCTATTATTGTAAATCACATAAACCACCCATTAGTTTTCCATTGTGTGCTAATG
GACAAGTTTTTGGTTTATATAAAAATACATGTGTTGGTAGCGATAATGTTACTGA
CTTTAATGCAATTGCAACATGTGACTGGACAAATGCTGGTGATTACATTTTAGCT
AACACCTGTACTGAAAGACTCAAGCTTTTTGCAGCAGAAACGCTCAAAGCTACT
GAGGAGACATTTAAACTGTCTTATGGTATTGCTACTGTACGTGAAGTGCTGTCTG
ACAGAGAATTACATCTTTCATGGGAAGTTGGTAAACCTAGACCACCACTTAACCG
AAATTATGTCTTTACTGGTTATCGTGTAACTAAAAACAGTAAAGTACAAATAGGA
GAGTACACCTTTGAAAAAGGTGACTATGGTGATGCTGTTGTTTACCGAGGTACAA
CAACTTACAAATTAAATGTTGGTGATTATTTTGTGCTGACATCACATACAGTAAT
GCCATTAAGTGCACCTACACTAGTGCCACAAGAGCACTATGTTAGAATTACTGGC
TTATACCCAACACTCAATATCTCAGATGAGTTTTCTAGCAATGTTGCAAATTATC
AAAAGGTTGGTATGCAAAAGTATTCTACACTCCAGGGACCACCTGGTACTGGTA
AGAGTCATTTTGCTATTGGCCTAGCTCTCTACTACCCTTCTGCTCGCATAGTGTAT
ACAGCTTGCTCTCATGCCGCTGTTGATGCACTATGTGAGAAGGCATTAAAATATT
TGCCTATAGATAAATGTAGTAGAATTATACCTGCACGTGCTCGTGTAGAGTGTTT
TGATAAATTCAAAGTGAATTCAACATTAGAACAGTATGTCTTTTGTACTGTAAAT
GCATTGCCTGAGACGACAGCAGATATAGTTGTCTTTGATGAAATTTCAATGGCCA
CAAATTATGATTTGAGTGTTGTCAATGCCAGATTACGTGCTAAGCACTATGTGTA
CATTGGCGACCCTGCTCAATTACCTGCACCACGCACATTGCTAACTAAGGGCACA
CTAGAACCAGAATATTTCAATTCAGTGTGTAGACTTATGAAAACTATAGGTCCAG
ACATGTTCCTCGGAACTTGTCGGCGTTGTCCTGCTGAAATTGTTGACACTGTGAG
TGCTTTGGTTTATGATAATAAGCTTAAAGCACATAAAGACAAATCAGCTCAATGC
TTTAAAATGTTTTATAAGGGTGTTATCACGCATGATGTTTCATCTGCAATTAACAG
GCCACAAATAGGCGTGGTAAGAGAATTCCTTACACGTAACCCTGCTTGGAGAAA
AGCTGTCTTTATTTCACCTTATAATTCACAGAATGCTGTAGCCTCAAAGATTTTGG
GACTACCAACTCAAACTGTTGATTCATCACAGGGCTCAGAATATGACTATGTCAT
ATTCACTCAAACCACTGAAACAGCTCACTCTTGTAATGTAAACAGATTTAATGTT
GCTATTACCAGAGCAAAAGTAGGCATACTTTGCATAATGTCTGATAGAGACCTTT
ATGACAAGTTGCAATTTACAAGTCTTGAAATTCCACGTAGGAATGTGGCAACTTT
ACAAGCTGAAAATGTAACAGGACTCTTTAAAGATTGTAGTAAGGTAATCACTGG
GTTACATCCTACACAGGCACCTACACACCTCAGTGTTGACACTAAATTCAAAACT
GAAGGTTTATGTGTTGACATACCTGGCATACCTAAGGACATGACCTATAGAAGA
CTCATCTCTATGATGGGTTTTAAAATGAATTATCAAGTTAATGGTTACCCTAACAT
GTTTATCACCCGCGAAGAAGCTATAAGACATGTACGTGCATGGATTGGCTTCGAT
GTCGAGGGGTGTCATGCTACTAGAGAAGCTGTTGGTACCAATTTACCTTTACAGC
TAGGTTTTTCTACAGGTGTTAACCTAGTTGCTGTACCTACAGGTTATGTTGATACA
CCTAATAATACAGATTTTTCCAGAGTTAGTGCTAAACCACCGCCTGGAGATCAAT
TTAAACACCTCATACCACTTATGTACAAAGGACTTCCTTGGAATGTAGTGCGTAT
AAAGATTGTACAAATGTTAAGTGACACACTTAAAAATCTCTCTGACAGAGTCGTA
TTTGTCTTATGGGCACATGGCTTTGAGTTGACATCTATGAAGTATTTTGTGAAAAT
AGGACCTGAGCGCACCTGTTGTCTATGTGATAGACGTGCCACATGCTTTTCCACT
GCTTCAGACACTTATGCCTGTTGGCATCATTCTATTGGATTTGATTACGTCTATAA
TCCGTTTATGATTGATGTTCAACAATGGGGTTTTACAGGTAACCTACAAAGCAAC
CATGATCTGTATTGTCAAGTCCATGGTAATGCACATGTAGCTAGTTGTGATGCAA
TCATGACTAGGTGTCTAGCTGTCCACGAGTGCTTTGTTAAGCGTGTTGACTGGAC
TATTGAATATCCTATAATTGGTGATGAACTGAAGATTAATGCGGCTTGTAGAAAG
GTTCAACACATGGTTGTTAAAGCTGCATTATTAGCAGACAAATTCCCAGTTCTTC
ACGACATTGGTAACCCTAAAGCTATTAAGTGTGTACCTCAAGCTGATGTAGAATG
GAAGTTCTATGATGCACAGCCTTGTAGTGACAAAGCTTATAAAATAGAAGAATT
ATTCTATTCTTATGCCACACATTCTGACAAATTCACAGATGGTGTATGCCTATTTT
GGAATTGCAATGTCGATAGATATCCTGCTAATTCCATTGTTTGTAGATTTGACACT
AGAGTGCTATCTAACCTTAACTTGCCTGGTTGTGATGGTGGCAGTTTGTATGTAA
ATAAACATGCATTCCACACACCAGCTTTTGATAAAAGTGCTTTTGTTAATTTAAA
ACAATTACCATTTTTCTATTACTCTGACAGTCCATGTGAGTCTCATGGAAAACAA
GTAGTGTCAGATATAGATTATGTACCACTAAAGTCTGCTACGTGTATAACACGTT
GCAATTTAGGTGGTGCTGTCTGTAGACATCATGCTAATGAGTACAGATTGTATCT
CGATGCTTATAACATGATGATCTCAGCTGGCTTTAGCTTGTGGGTTTACAAACAA
TTTGATACTTATAACCTCTGGAACACTTTTACAAGACTTCAGAGTTTAGAAAATG
TGGCTTTTAATGTTGTAAATAAGGGACACTTTGATGGACAACAGGGTGAAGTACC
AGTTTCTATCATTAATAACACTGTTTACACAAAAGTTGATGGTGTTGATGTAGAA
TTGTTTGAAAATAAAACAACATTACCTGTTAATGTAGCATTTGAGCTTTGGGCTA
AGCGCAACATTAAACCAGTACCAGAGGTGAAAATACTCAATAATTTGGGTGTGG
ACATTGCTGCTAATACTGTGATCTGGGACTACAAAAGAGATGCTCCAGCACATAT
ATCTACTATTGGTGTTTGTTCTATGACTGACATAGCCAAGAAACCAACTGAAACG
ATTTGTGCACCACTCACTGTCTTTTTTGATGGTAGAGTTGATGGTCAAGTAGACTT
ATTTAGAAATGCCCGTAATGGTGTTCTTATTACAGAAGGTAGTGTTAAAGGTTTA
CAACCATCTGTAGGTCCCAAACAAGCTAGTCTTAATGGAGTCACATTAATTGGAG
AAGCCGTAAAAACACAGTTCAATTATTATAAGAAAGTTGATGGTGTTGTCCAACA
ATTACCTGAAACTTACTTTACTCAGAGTAGAAATTTACAAGAATTTAAACCCAGG
AGTCAAATGGAAATTGATTTCTTAGAATTAGCTATGGATGAATTCATTGAACGGT
ATAAATTAGAAGGCTATGCCTTCGAACATATCGTTTATGGAGATTTTAGTCATAG
TCAGTTAGGTGGTTTACATCTACTGATTGGACTAGCTAAACGTTTTAAGGAATCA
CCTTTTGAATTAGAAGATTTTATTCCTATGGACAGTACAGTTAAAAACTATTTCAT
AACAGATGCGCAAACAGGTTCATCTAAGTGTGTGTGTTCTGTTATTGATTTATTA
CTTGATGATTTTGTTGAAATAATAAAATCCCAAGATTTATCTGTAGTTTCTAAGGT
TGTCAAAGTGACTATTGACTATACAGAAATTTCATTTATGCTTTGGTGTAAAGAT
GGCCATGTAGAAACATTTTACCCAAAATTACAATCTAGTCAAGCGTGGCAACCG
GGTGTTGCTATGCCTAATCTTTACAAAATGCAAAGAATGCTATTAGAAAAGTGTG
ACCTTCAAAATTATGGTGATAGTGCAACATTACCTAAAGGCATAATGATGAATGT
CGCAAAATATACTCAACTGTGTCAATATTTAAACACATTAACATTAGCTGTACCC
TATAATATGAGAGTTATACATTTTGGTGCTGGTTCTGATAAAGGAGTTGCACCAG
GTACAGCTGTTTTAAGACAGTGGTTGCCTACGGGTACGCTGCTTGTCGATTCAGA
TCTTAATGACTTTGTCTCTGATGCAGATTCAACTTTGATTGGTGATTGTGCAACTG
TACATACAGCTAATAAATGGGATCTCATTATTAGTGATATGTACGACCCTAAGAC
TAAAAATGTTACAAAAGAAAATGACTCTAAAGAGGGTTTTTTCACTTACATTTGT
GGGTTTATACAACAAAAGCTAGCTCTTGGAGGTTCCGTGGCTATAAAGATAACA
GAACATTCTTGGAATGCTGATCTTTATAAGCTCATGGGACACTTCGCATGGTGGA
CAGCCTTTGTTACTAATGTGAATGCGTCATCATCTGAAGCATTTTTAATTGGATGT
AATTATCTTGGCAAACCACGCGAACAAATAGATGGTTATGTCATGCATGCAAATT
ACATATTTTGGAGGAATACAAATCCAATTCAGTTGTCTTCCTATTCTTTATTTGAC
ATGAGTAAATTTCCCCTTAAATTAAGGGGTACTGCTGTTATGTCTTTAAAAGAAG
GTCAAATCAATGATATGATTTTATCTCTTCTTAGTAAAGGTAGACTTATAATTAG
AGAAAACAACAGAGTTGTTATTTCTAGTGATGTTCTTGTTAACAACTAAACGAAC
AATGTTTGTTTTTCTTGTTTTATTGCCACTAGTCTCTAGTCAGTGTGTTAATCTTA
CAACCAGAACTCAATTACCCCCTGCATACACTAATTCTTTCACACGTGGTGTTTA
TTACCCTGACAAAGTTTTCAGATCCTCAGTTTTACATTCAACTCAGGACTTGTTCT
TACCTTTCTTTTCCAATGTTACTTGGTTCCATGCTATACATGTCTCTGGGACCAAT
GGTACTAAGAGGTTTGATAACCCTGTCCTACCATTTAATGATGGTGTTTATTTTGC
TTCCAtTGAGAAGTCTAACATAATAAGAGGCTGGATTTTTGGTACTACTTTAGACT
CGAAGACCCAGTCCCTACTTATTGTTAATAACGCTACTAATGTTGTTATTAAAGT
CTGTGAATTTCAATTTTGTAATGATCCATTTTTGGaTGTTTATTACCACAAAAACA
ACAAAAGTTGGATGaAAAGTGAGTTCAGAGTTTATTCTAGTGCGAATAATTGCAC
TTTTGAATATGTCTCTCAGCCTTTTCTTATGGACCTTGAAGGAAAACAGGGTAATT
TCAAAAATCTTAGGGAATTTGTGTTTAAGAATATTGATGGTTATTTTAAAATATA
TTCTAAGCACACGCCTATTAATTTAGTGCGTGATCTCCCtCAGGGTTTTTCGGCTT
TAGAACCATTGGTAGATTTGCCAATAGGTATTAACATCACTAGGTTTCAAACTTT
ACTTGCTTTACATAGAAGTTATTTGACTCCTGGTGATTCTTCTTCAGGTTGGACAG
CTGGTGCTGCAGCTTATTATGTGGGTTATCTTCAACCTAGGACTTTTCTATTAAAA
TATAATGAAAATGGAACCATTACAGATGCTGTAGACTGTGCACTTGACCCTCTCT
CAGAAACAAAGTGTACGTTGAAATCCTTCACTGTAGAAAAAGGAATCTATCAAA
CTTCTAACTTTAGAGTCCAACCAACAGAATCTATTGTTAGATTTCCTAATATTACA
AACTTGTGCCCTTTTGGTGAAGTTTTTAACGCCACCAGATTTGCATCTGTTTATGC
TTGGAACAGGAAGAGAATCAGCAACTGTGTTGCTGATTATTCTGTCCTATATAAT
TCCGCATCATTTTCCACTTTTAAGTGTTATGGAGTGTCTCCTACTAAATTAAATGA
TCTCTGCTTTACTAATGTCTATGCAGATTCATTTGTAATTAGAGGTGATGAAGTCA
GACAAATCGCTCCAGGGCAAACTGGAAAGATTGCTGATTATAATTATAAATTAC
CAGATGATTTTACAGGCTGCGTTATAGCTTGGAATTCTAACAATCTTGATTCTAA
GGTTGGTGGTAATTATAATTACCgGTATAGATTGTTTAGGAAGTCTAATCTCAAA
CCTTTTGAGAGAGATATTTCAACTGAAATCTATCAGGCCGGTAGCACACCTTGTA
ATGGTGTTcAAGGTTTTAATTGTTACTTTCCTTTACAATCATATGGTTTCCAACCC
ACTAATGGTGTTGGTTACCAACCATACAGAGTAGTAGTACTTTCTTTTGAACTTCT
ACATGCACCAGCAACTGTTTGTGGACCTAAAAAGTCTACTAATTTGGTTAAAAAC
AAATGTGTCAATTTCAACTTCAATGGTTTAACAGGCACAGGTGTTCTTACTGAGT
CTAACAAAAAGTTTCTGCCTTTCCAACAATTTGGCAGAGACATTGCTGACACTAC
TGATGCTGTCCGTGATCCACAGACACTTGAGATTCTTGACATTACACCATGTTCTT
TTGGTGGTGTCAGTGTTATAACACCAGGAACAAATACTTCTAACCAGGTTGCTGT
TCTTTATCAGGgTGTTAACTGCACAGAAGTCCCTGTTGCTATTCATGCAGATCAA
CTTACTCCTACTTGGCGTGTTTATTCTACAGGTTCTAATGTTTTTCAAACACGTGC
AGGCTGTTTAATAGGGGCTGAACATGTCAACAACTCATATGAGTGTGACATACCC
ATTGGTGCAGGTATATGCGCTAGTTATCAGACTCAGACTAATTCTCgTCGGCGGG
CACGTAGTGTAGCTAGTCAATCCATCATTGCCTACACTATGTCACTTGGTGCAGA
AAATTCAGTTGCTTACTCTAATAACTCTATTGCCATACCCACAAATTTTACTATTA
GTGTTACCACAGAAATTCTACCAGTGTCTATGACCAAGACATCAGTAGATTGTAC
AATGTACATTTGTGGTGATTCAACTGAATGCAGCAATCTTTTGTTGCAATATGGC
AGTTTTTGTACACAATTAAACCGTGCTTTAACTGGAATAGCTGTTGAACAAGACA
AAAACACCCAAGAAGTTTTTGCACAAGTCAAACAAATTTACAAAACACCACCAA
TTAAAGATTTTGGTGGTTTTAATTTTTCACAAATATTACCAGATCCATCAAAACCA
AGCAAGAGGTCATTTATTGAAGATCTACTTTTCAACAAAGTGACACTTGCAGATG
CTGGCTTCATCAAACAATATGGTGATTGCCTTGGTGATATTGCTGCTAGAGACCT
CATTTGTGCACAAAAGTTTAACGGCCTTACTGTTTTGCCACCTTTGCTCACAGATG
AAATGATTGCTCAATACACTTCTGCACTGTTAGCGGGTACAATCACTTCTGGTTG
GACCTTTGGTGCAGGTGCTGCATTACAAATACCATTTGCTATGCAAATGGCTTAT
AGGTTTAATGGTATTGGAGTTACACAGAATGTTCTCTATGAGAACCAAAAATTGA
TTGCCAACCAATTTAATAGTGCTATTGGCAAAATTCAAGACTCACTTTCTTCCAC
AGCAAGTGCACTTGGAAAACTTCAAGATGTGGTCAACCAAAATGCACAAGCTTT
AAACACGCTTGTTAAACAACTTAGCTCCAATTTTGGTGCAATTTCAAGTGTTTTA
AATGATATCCTTTCACGTCTTGACAAAGTTGAGGCTGAAGTGCAAATTGATAGGT
TGATCACAGGCAGACTTCAAAGTTTGCAGACATATGTGACTCAACAATTAATTAG
AGCTGCAGAAATCAGAGCTTCTGCTAATCTTGCTGCTACTAAAATGTCAGAGTGT
GTACTTGGACAATCAAAAAGAGTTGATTTTTGTGGAAAGGGCTATCATCTTATGT
CCTTCCCTCAGTCAGCACCTCATGGTGTAGTCTTCTTGCATGTGACTTATGTCCC
TGCACAAGAAAAGAACTTCACAACTGCTCCTGCCATTTGTCATGATGGAAAAGC
ACACTTTCCTCGTGAAGGTGTCTTTGTTTCAAATGGCACACACTGGTTTGTAACA
CAAAGGAATTTTTATGAACCACAAATCATTACTACAGACAACACATTTGTGTCTG
GTAACTGTGATGTTGTAATAGGAATTGTCAACAACACAGTTTATGATCCTTTGCA
ACCTGAATTAGACTCATTCAAGGAGGAGTTAGATAAATATTTTAAGAATCATACA
TCACCAGATGTTGATTTAGGTGACATCTCTGGCATTAATGCTTCAGTTGTAAACA
TTCAAAAAGAAATTGACCGCCTCAATGAGGTTGCCAAGAATTTAAATGAATCTCT
CATCGATCTCCAAGAACTTGGAAAGTATGAGCAGTATATAAAATGGCCATGGTA
CATTTGGCTAGGTTTTATAGCTGGCTTGATTGCCATAGTAATGGTGACAATTATG
CTTTGCTGTATGACCAGTTGCTGTAGTTGTCTCAAGGGCTGTTGTTCTTGTGGATC
CTGCTGCAAATTTGATGAAGACGACTCTGAGCCAGTGCTCAAAGGAGTCAAATT
ACATTACACATAAACGAACTTATGGATTTGTTTATGAGAATCTTCACAATTGGAA
CTGTAACTTTGAAGCAAGGTGAAATCAAGGATGCTACTCCTTCAGATTTTGTTCG
CGCTACTGCAACGATACCGATACAAGCCTCACTCCCTTTCGGATGGCTTATTGTT
GGCGTTGCACTTCTTGCTGTTTTTCAGAGCGCTTCCAAAATCATAACCCTCAAAA
AGAGATGGCAACTAGCACTCTCCAAGGGTGTTCACTTTGTTTGCAACTTGCTGTT
GTTGTTTGTAACAGTTTACTCACACCTTTTGCTCGTTGCTGCTGGCCTTGAAGCCC
CTTTTCTCTATCTTTATGCTTTAGTCTACTTCTTGCAGAGTATAAACTTTGTAAGA
ATAATAATGAGGCTTTGGCTTTGCTGGAAATGCCGTTCCAAAAACCCATTACTTT
ATGATGCCAACTATTTTCTTTGCTGGCATACTAATTGTTACGACTATTGTATACCT
TACAATAGTGTAACTTCTTCAATTGTCATTACTTCAGGTGATGGCACAACAAGTC
CTATTTCTGAACATGACTACCAGATTGGTGGTTATACTGAAAAATGGGAATCTGG
AGTAAAAGACTGTGTTGTATTACACAGTTACTTCACTTCAGACTATTACCAGCTG
TACTCAACTCAATTGAGTACAGACACTGGTGTTGAACATGTTACCTTCTTCATCT
ACAATAAAATTGTTGATGAGCCTGAAGAACATGTCCAAATTCACACAATCGACG
GTTCATCCGGAGTTGTTAATCCAGTAATGGAACCAATTTATGATGAACCGACGAC
GACTACTAGCGTGCCTTTGTAAGCACAAGCTGATGAGTACGAACTTATGTACTCA
TTCGTTTCGGAAGAGACAGGTACGTTAATAGTTAATAGCGTACTTCTTTTTCTTGC
TTTCGTGGTATTCTTGCTAGTTACACTAGCCATCCTTACTGCGCTTCGATTGTGTG
CGTACTGCTGCAATATTGTTAACGTGAGTCTTGTAAAACCTTCTTTTTACGTTTAC
TCTCGTGTTAAAAATCTGAATTCTTCTAGAGTTCCTGATCTTCTGGTCTAAACGAA
CTAAATATTATATTAGTTTTTCTGTTTGGAACTTTAATTTTAGCCATGGCAGATTC
CAACGGTACTATTACCGTTGAAGAGCTTAAAAAGCTCCTTGAACAATGGAACCT
AGTAATAGGTTTCCTATTCCTTACATGGATTTGTCTTCTACAATTTGCCTATGCCA
ACAGGAATAGGTTTTTGTATATAATTAAGTTAATTTTCCTCTGGCTGTTATGGCCA
GTAACTTTAGCTTGTTTTGTGCTTGCTGCTGTTTACAGAATAAATTGGATCACCGG
TGGAATTGCTATCGCAATGGCTTGTCTTGTAGGCTTGATGTGGCTCAGCTACTTCA
TTGCTTCTTTCAGACTGTTTGCGCGTACGCGATCCATGTGGTCATTCAATCCAGAA
ACTAACATTCTTCTCAACGTGCCACTCCATGGCACTATTCTGACCAGACCGCTTCT
AGAAAGTGAACTCGTAATCGGAGCTGTGATCCTTCGTGGACATCTTCGTATTGCT
GGACACCATCTAGGACGCTGTGACATCAAGGACCTGCCTAAAGAAATCACTGTT
GCTACATCACGAACGCTTTCTTATTACAAATTGGGAGCTTCGCAGCGTGTAGCAG
GTGACTCAGGTTTTGCTGCATACAGTCGCTACAGGATTGGCAACTATAAATTAAA
CACAGACCATTCCAGTAGCAGTGACAATATTGCTTTGCTTGTACAGTAAGTGACA
ACAGATGTTTCATCTCGTTGACTTTCAGGTTACTATAGCAGAGATATTACTAATTA
TTATGAGGACTTTTAAAGTTTCCATTTGGAATCTTGATTACATCATAAACCTCATA
ATTAAAAATTTATCTAAGTCACTAACTGAGAATAAATATTCTCAATTAGATGAAG
AGCAACCAATGGAGATTGATTAAACGAACATGAAAATTATTCTTTTCTTGGCACT
GATAACACTCGCTACTTGTGAGCTTTATCACTACCAAGAGTGTGTTAGAGGTACA
ACAGTACTTTTAAAAGAACCTTGCTCTTCTGGAACATACGAGGGCAATTCACCAT
TTCATCCTCTAGCTGATAACAAATTTGCACTGACTTGCTTTAGCACTCAATTTGCT
TTTGCTTGTCCTGACGGCGTAAAACACGTCTATCAGTTACGTGCCAGATCAGTTT
CACCTAAACTGTTCATCAGACAAGAGGAAGTTCAAGAACTTTACTCTCCAATTTT
TCTTATTGTTGCGGCAATAGTGTTTATAACACTTTGCTTCACACTCAAAAGAAAG
ACAGAATGATTGAACTTTCATTAATTGACTTCTATTTGTGCTTTTTAGCCTTTCTG
CTATTCCTTGTTTTAATTATGCTTATTATCTTTTGGTTCTCACTTGAACTGCAAGAT
CATAATGAAACTTGTCACGCCTAAACGAACATGAAATTTCTTGTTTTCTTAGGAA
TCATCACAACTGTAGCTGCATTTCACCAAGAATGTAGTTTACAGTCATGTACTCA
ACATCAACCATATGTAGTTGATGACCCGTGTCCTATTCACTTCTATTCTAAATGGT
ATATTAGAGTAGGAGCTAGAAAATCAGCACCTTTAATTGAATTGTGCGTGGATGA
GGCTGGTTCTAAATCACCCATTCAGTACATCGATATCGGTAATTATACAGTTTCC
TGTTTACCTTTTACAATTAATTGCCAGGAACCTAAATTGGGTAGTCTTGTAGTGCG
TTGTTCGTTCTATGAAGACTTTTTAGAGTATCATGACGTTCGTGTTGTTTTAGATT
TCATCTAAACGAACAAACTAAAATGTCTGATAATGGACCCCAAAATCAGCGAAA
TGCACCCCGCATTACGTTTGGTGGACCCTCAGATTCAACTGGCAGTAACCAGAAT
GGAGAACGCAGTGGGGCGCGATCAAAACAACGTCGGCCCCAAGGTTTACCCAAT
AATACTGCGTCTTGGTTCACCGCTCTCACTCAACATGGCAAGGAAGACCTTAAAT
TCCCTCGAGGACAAGGCGTTCCAATTAACACCAATAGCAGTCCAGATGACCAAA
TTGGCTACTACCGAAGAGCTACCAGACGAATTCGTGGTGGTGACGGTAAAATGA
AAGATCTCAGTCCAAGATGGTATTTCTACTACCTAGGAACTGGGCCAGAAGCTG
GACTTCCCTATGGTGCTAACAAAGACGGCATCATATGGGTTGCAACTGAGGGAG
CCTTGAATACACCAAAAGATCACATTGGCACCCGCAATCCTGCTAACAATGCTGC
AATCGTGCTACAACTTCCTCAAGGAACAACATTGCCAAAAGGCTTCTACGCAGA
AGGGAGCAGAGGCGGCAGTCAAGCCTCTTCTCGTTCCTCATCACGTAGTCGCAAC
AGTTCAAGAAATTCAACTCCAGGCAGCAGTAGGGGAACTTCTCCTGCTAGAATG
GCTGGCAATGGCGGTGATGCTGCTCTTGCTTTGCTGCTGCTTGACAGATTGAACC
AGCTTGAGAGCAAAATGTCTGGTAAAGGCCAACAACAACAAGGCCAAACTGTCA
CTAAGAAATCTGCTGCTGAGGCTTCTAAGAAGCCTCGGCAAAAACGTACTGCCA
CTAAAGCATACAATGTAACACAAGCTTTCGGCAGACGTGGTCCAGAACAAACCC
AAGGAAATTTTGGGGACCAGGAACTAATCAGACAAGGAACTGATTACAAACATT
GGCCGCAAATTGCACAATTTGCCCCCAGCGCTTCAGCGTTCTTCGGAATGTCGCG
CATTGGCATGGAAGTCACACCTTCGGGAACGTGGTTGACCTACACAGGTGCCATC
AAATTGGATGACAAAGATCCAAATTTCAAAGATCAAGTCATTTTGCTGAATAAGC
ATATTGACGCATACAAAACATTCCCACCAACAGAGCCTAAAAAGGACAAAAAGA
AGAAGGCTGATGAAACTCAAGCCTTACCGCAGAGACAGAAGAAACAGCAAACT
GTGACTCTTCTTCCTGCTGCAGATTTGGATGATTTCTCCAAACAATTGCAACAATC
CATGAGCAGTGCTGACTCAACTCAGGCCTAAACTCATGCAGACCACACAAGGCA
GATGGGCTATATAAACGTTTTCGCTTTTCCGTTTACGATATATAGTCTACTCTTGT
GCAGAATGAATTCTCGTAACTACATAGCACAAGTAGATGTAGTTAACTTTAATCT
CACATAGCAATCTTTAATCAGTGTGTAACATTAGGGAGGACTTGAAAGAGCCAC
CACATTTTCACCGAGGCCACGCGGAGTACGATCGAGTGTACAGTGAACAATGCT
AGGGAGAGCTGCCTATATGGAAGAGCCCTAATGTGTAAAATTAATTTTAGTAGTG
CTATCCCCATGTGATTTTAATAGCTTCTTAGGAGAATGACAAAAAAAAAAAAAA
AAAAAAAAAAAAAAAAAAAAAAAAAAAAAAAAAAAAAAAAAAAAAGGGTCGG
CATGGCATCTCCACCTCCTCGCGGTCCGACCTGGGCATCCGAAGGAGGACGCAC
GTCCACTCGGATGGCTAAGGGAGCAGCACACTGGCGGCCGTTACTAGGGCCGCG
CCCTTCCCAACAGTTGCGCAGCCTGAATGGCGAATGGAGATCCAATTTTTAAGTG
TATAATGTGTTAAACTACTGATTCTAATTGTTTGTGTATTTTAGATTCACAGTCCC
AAGGCTCATTTCAGGCCCCTCAGTCCTCACAGTCTGTTCATGATCATAATCAGCC
ATACCACATTTGTAGAGGTTTTACTTGCTTTAAAAAACCTCCCACACCTCCCCCTG
AACCTGAAACATAAAATGAATGCAATTGTTGTTGTTAACTTGTTTATTGCAGCTT
ATAATGGTTACAAATAAAGCAATAGCATCACAAATTTCACAAATAAAGCATTTTT
TTCACTGCATTCTAGTTGTGGTTTGTCCAAACTCATCAATGTATCTTAAAGCTTGA
GTATTCTATAGTCTCACCTAAATAGCTTGGCGTAATCATGGTCATAGCTGTTTCCT
GTGTGAAATTGTTATCCGCTCACAATTCCACACAACATACGAGCCGGAAGCATA
AAGTGTAAAGCCTGGGGTGCCTAATGAGTGAGCTAACTCACATTAATTGCGTTGC
GCTCACTGCCCGCTTTCCAGTCGGGAAACCTGTCGTGCCAGCTGCATTAATGAAT
CGGCCAACGCGAACCCCTTGCGGCCGCCCGGGCCGTCGACCAATTCTCATGTTTG
ACAGCTTATCATCGAATTTCTGCCATTCATCCGCTTATTATCACTTATTCAGGCGT
AGCAACCAGGCGTTTAAGGGCACCAATAACTGCCTTAAAAAAATTACGCCCCGC
CCTGCCACTCATCGCAGTACTGTTGTAATTCATTAAGCATTCTGCCGACATGGAA
GCCATCACAAACGGCATGATGAACCTGAATCGCCAGCGGCATCAGCACCTTGTC
GCCTTGCGTATAATATTTGCCCATGGTGAAAACGGGGGCGAAGAAGTTGTCCAT
ATTGGCCACGTTTAAATCAAAACTGGTGAAACTCACCCAGGGATTGGCTGAGAC
GAAAAACATATTCTCAATAAACCCTTTAGGGAAATAGGCCAGGTTTTCACCGTAA
CACGCCACATCTTGCGAATATATGTGTAGAAACTGCCGGAAATCGTCGTGGTATT
CACTCCAGAGCGATGAAAACGTTTCAGTTTGCTCATGGAAAACGGTGTAACAAG
GGTGAACACTATCCCATATCACCAGCTCACCGTCTTTCATTGCCATACGAAATTC
CGGATGAGCATTCATCAGGCGGGCAAGAATGTGAATAAAGGCCGGATAAAACTT
GTGCTTATTTTTCTTTACGGTCTTTAAAAAGGCCGTAATATCCAGCTGAACGGTCT
GGTTATAGGTACATTGAGCAACTGACTGAAATGCCTCAAAATGTTCTTTACGATG
CCATTGGGATATATCAACGGTGGTATATCCAGTGATTTTTTTCTCCATTTTAGCTT
CCTTAGCTCCTGAAAATCTCGATAACTCAAAAAATACGCCCGGTAGTGATCTTAT
TTCATTATGGTGAAAGTTGGAACCTCTTACGTGCCGATCAACGTCTCATTTTCGCC
AAAAGTTGGCCCAGGGCTTCCCGGTATCAACAGGGACACCAGGATTTATTTATTC
TGCGAAGTGATCTTCCGTCACAGGTATTTATTCGCGATAAGCTCATGGAGCGGCG
TAACCGTCGCACAGGAAGGACAGAGAAAGCGCGGATCTGGGAAGTGACGGACA
GAACGGTCAGGACCTGGATTGGGGAGGCGGTTGCCGCCGCTGCTGCTGACGGTG
TGACGTTCTCTGTTCCGGTCACACCACATACGTTCCGCCATTCCTATGCGATGCAC
ATGCTGTATGCCGGTATACCGCTGAAAGTTCTGCAAAGCCTGATGGGACATAAGT
CCATCAGTTCAACGGAAGTCTACACGAAGGTTTTTGCGCTGGATGTGGCTGCCCG
GCACCGGGTGCAGTTTGCGATGCCGGAGTCTGATGCGGTTGCGATGCTGAAACA
ATTATCCTGAGAATAAATGCCTTGGCCTTTATATGGAAATGTGGAACTGAGTGGA
TATGCTGTTTTTGTCTGTTAAACAGAGAAGCTGGCTGTTATCCACTGAGAAGCGA
ACGAAACAGTCGGGAAAATCTCCCATTATCGTAGAGATCCGCATTATTAATCTCA
GGAGCCTGTGTAGCGTTTATAGGAAGTAGTGTTCTGTCATGATGCCTGCAAGCGG
TAACGAAAACGATTTGAATATGCCTTCAGGAACAATAGAAATCTTCGTGCGGTGT
TACGTTGAAGTGGAGCGGATTATGTCAGCAATGGACAGAACAACCTAATGAACA
CAGAACCATGATGTGGTCTGTCCTTTTACAGCCAGTAGTGCTCGCCGCAGTCGAG
CGACAGGGCGAAGCCCTCGGCTGGTTGCCCTCGCCGCTGGGCTGGCGGCCGTCT
ATGGCCCTGCAAACGCGCCAGAAACGCCGTCGAAGCCGTGTGCGAGACACCGCG
GCCGGCCGCCGGCGTTGTGGATACCTCGCGGAAAACTTGGCCCTCACTGACAGA
TGAGGGGCGGACGTTGACACTTGAGGGGCCGACTCACCCGGCGCGGCGTTGACA
GATGAGGGGCAGGCTCGATTTCGGCCGGCGACGTGGAGCTGGCCAGCCTCGCAA
ATCGGCGAAAACGCCTGATTTTACGCGAGTTTCCCACAGATGATGTGGACAAGC
CTGGGGATAAGTGCCCTGCGGTATTGACACTTGAGGGGCGCGACTACTGACAGA
TGAGGGGCGCGATCCTTGACACTTGAGGGGCAGAGTGCTGACAGATGAGGGGCG
CACCTATTGACATTTGAGGGGCTGTCCACAGGCAGAAAATCCAGCATTTGCAAG
GGTTTCCGCCCGTTTTTCGGCCACCGCTAACCTGTCTTTTAACCTGCTTTTAAACC
AATATTTATAAACCTTGTTTTTAACCAGGGCTGCGCCCTGTGCGCGTGACCGCGC
ACGCCGAAGGGGGGTGCCCCCCCTTCTCGAACCCTCCCGGTCGAGTGAGCGAGG
AAGCACCAGGGAACAGCACTTATATATTCTGCTTACACACGATGCCTGAAAAAA
CTTCCCTTGGGGTTATCCACTTATCCACGGGGATATTTTTATAATTATTTTTTTTAT
AGTTTTTAGATCTTCTTTTTTAGAGCGCCTTGTAGGCCTTTATCCATGCTGGTTCT
AGAGAAGGTGTTGTGACAAATTGCCCTTTCAGTGTGACAAATCACCCTCAAATGA
CAGTCCTGTCTGTGACAAATTGCCCTTAACCCTGTGACAAATTGCCCTCAGAAGA
AGCTGTTTTTTCACAAAGTTATCCCTGCTTATTGACTCTTTTTTATTTAGTGTGACA
ATCTAAAAACTTGTCACACTTCACATGGATCTGTCATGGCGGAAACAGCGGTTAT
CAATCACAAGAAACGTAAAAATAGCCCGCGAATCGTCCAGTCAAACGACCTCAC
TGAGGCGGCATATAGTCTCTCCCGGGATCAAAAACGTATGCTGTATCTGTTCGTT
GACCAGATCAGAAAATCTGATGGCACCCTACAGGAACATGACGGTATCTGCGAG
ATCCATGTTGCTAAATATGCTGAAATATTCGGATTGACCTCTGCGGAAGCCAGTA
AGGATATACGGCAGGCATTGAAGAGTTTCGCGGGGAAGGAAGTGGTTTTTTATC
GCCCTGAAGAGGATGCCGGCGATGAAAAAGGCTATGAATCTTTTCCTTGGTTTAT
CAAACGTGCGCACAGTCCATCCAGAGGGCTTTACAGTGTACATATCAACCCATAT
CTCATTCCCTTCTTTATCGGGTTACAGAACCGGTTTACGCAGTTTCGGCTTAGTGA
AACAAAAGAAATCACCAATCCGTATGCCATGCGTTTATACGAATCCCTGTGTCAG
TATCGTAAGCCGGATGGCTCAGGCATCGTCTCTCTGAAAATCGACTGGATCATAG
AGCGTTACCAGCTGCCTCAAAGTTACCAGCGTATGCCTGACTTCCGCCGCCGCTT
CCTGCAGGTCTGTGTTAATGAGATCAACAGCAGAACTCCAATGCGCCTCTCATAC
ATTGAGAAAAAGAAAGGCCGCCAGACGACTCATATCGTATTTTCCTTCCGCGATA
TCACTTCCATGACGACAGGATAGTCTGAGGGTTATCTGTCACAGATTTGAGGGTG
GTTCGTCACATTTGTTCTGACCTACTGAGGGTAATTTGTCACAGTTTTGCTGTTTC
CTTCAGCCTGCATGGATTTTCTCATACTTTTTGAACTGTAATTTTTAAGGAAGCCA
AATTTGAGGGCAGTTTGTCACAGTTGATTTCCTTCTCTTTCCCTTCGTCATGTGAC
CTGATATCGGGGGTTAGTTCGTCATCATTGATGAGGGTTGATTATCACAGTTTATT
ACTCTGAATTGGCTATCCGCGTGTGTACCTCTACCTGGAGTTTTTCCCACGGTGG
ATATTTCTTCTTGCGCTGAGCGTAAGAGCTATCTGACAGAACAGTTCTTCTTTGCT
TCCTCGCCAGTTCGCTCGCTATGCTCGGTTACACGGCTGCGGCG

### DETAILED DESCRIPTION

[0097] The present inventors have primarily developed a (partly) codon deoptimized (CD) SARS-COV-2 genome for use as a vaccine. The vaccine can prevent infection with SARS-CoV-2 virus and the complications that arise following infection (acute respiratory distress syndrome).

[0098] Using codon deoptimization (CD) technology, the inventors inserted a number of codon changes in the genome of the virus (wild-type SARS-COV-2, Wuhan strain, https://www.ncbi.nlm.nih.gov/nuccore/1798174254) with the objective of decreasing replication efficiency in mammalian cells and rendering the virus attenuated compared to wild-type SARS-COV-2. Using this strategy, the resulting viruses would be strongly attenuated but still produce viral proteins with properties similar to those produced by a wild-type virus. Thus, using CD technology, the inventors are able to generate live attenuated SARS-COV-2 vaccine candidates.

[0099] By inserting a substantial number of changes into each vaccine candidate, the chance of reversion to wild-type is negligible, which is a crucial safety feature of the vaccines. This represents a substantial competitive advantage over vaccines with only a small number of mutations.

[0100] CD in case of SARS-COV-2 presumably results in slower non-structural polyprotein translation leading to its reduced production, slower replication and, as a result, in attenuation of the virus, compared with wild-type SARS-COV-2. For some embodiments, such vaccine candidates have virtually no risk of de-attenuation (the chance of reversion to wild-type is negligible) because of too many substitutions, all of which have, taken alone, minimal effect on virus, have been made in the coding sequence.

[0101] CD, as used herein, involves substituting normal codons in the wild-type SARS-CoV-2 genome with synonymous codons used less frequently in the host (e.g. humans), so that the resulting virus proteins are identical to wild-type virus proteins. Moreover, the resulting virus is highly attenuated, but protein function is not compromised. CD entails genetically engineering the virus.

[0102] Non-limiting embodiments of the invention are defined below.

[0103] According to a first embodiment of the present invention, there is provided live attenuated severe acute respiratory syndrome coronavirus 2 (SARS-COV-2), SARS-COV-2. SARS-COV-2 particle or SARS-COV-2 nucleic acid comprising a partly codon deoptimized SARS-COV-2 genome.

[0104] According to a second embodiment of the present invention, there is provided a recombinant, isolated or substantially purified nucleic acid comprising a partly codon deoptimized SARS-COV-2 genome or partly codon deoptimized region thereof.

[0105] According to a third embodiment of the present invention, there is provided a vector, plasmid or genetic construct comprising the nucleic acid of the second embodiment.

[0106] According to a fourth embodiment of the present invention, there is provided a cell or isolate containing the live attenuated SARS-COV-2, SARS-COV-2, SARS-COV-2 particle or SARS-COV-2 nucleic acid of the first embodiment, the nucleic acid of the second embodiment, or the vector, plasmid or genetic construct of the third embodiment.

[0107] According to a fifth embodiment of the present invention, there is provided a vaccine comprising the live attenuated SARS-COV-2, SARS-COV-2, SARS-COV-2 particle or SARS-COV-2 nucleic acid of the first embodiment, the recombinant, isolated or substantially purified nucleic acid of the second embodiment, the vector, plasmid or genetic construct of the third embodiment, or the cell or isolate of the fourth embodiment.

[0108] According to a sixth embodiment of the present invention, there is provided a pharmaceutical preparation comprising the live attenuated SARS-COV-2, SARS-COV-2, SARS-COV-2 particle or SARS-COV-2 nucleic acid of the first embodiment, the recombinant, isolated or substantially purified nucleic acid of the second embodiment, the vector, plasmid or genetic construct of the third embodiment, or the cell or isolate of the fourth embodiment.

[0109] According to a seventh embodiment of the present invention, there is provided an immunogenic composition comprising the live attenuated SARS-COV-2, SARS-COV-2, SARS-COV-2 particle or SARS-COV-2 nucleic acid of the first embodiment, the recombinant, isolated or substantially purified nucleic acid of the second embodiment, the vector, plasmid or genetic construct of the third embodiment, or the cell or isolate of the fourth embodiment.

[0110] According to an eighth embodiment of the present invention, there is provided a method of: (1) vaccinating a subject; (2) prophylactically immunizing a subject against SARS-CoV-2 or SARS-COV-2-like virus; (3) preventing a subject from contracting a SARS-COV-2 infection naturally or a SARS-COV-2-like infection naturally; (4) reducing the severity of a natural SARS-COV-2 disease or natural SARS-COV-2-like disease in a subject; or (5) treating a subject having a natural SARS-COV-2 infection or natural SARS-COV-2-like infection, said method comprising the step of administering to the subject: the live attenuated SARS-COV-2, SARS-COV-2, SARS-COV-2 particle or SARS-COV-2 nucleic acid of the first embodiment; the recombinant, isolated or substantially purified nucleic acid of the second embodiment; the vector, plasmid or genetic construct of the third embodiment; the cell or isolate of the fourth embodiment; the vaccine of the fifth embodiment; the pharmaceutical preparation of the sixth embodiment; or the immunogenic composition of the seventh embodiment.

[0111] According to a ninth embodiment of the present invention, there is provided use of: the live attenuated SARS-COV-2, SARS-COV-2, SARS-COV-2 particle or SARS-COV-2 nucleic acid of the first embodiment; the recombinant, isolated or substantially purified nucleic acid of the second embodiment; the vector, plasmid or genetic construct of the third embodiment; the cell or isolate of the fourth embodiment; the vaccine of the fifth embodiment; the pharmaceutical preparation of the sixth embodiment; or the immunogenic composition of the seventh embodiment, in the preparation of a medicament for: (1) vaccinating a subject; (2) prophylactically immunizing a subject against SARS-COV-2 or SARS-COV-2-like virus; (3) preventing a subject from contracting a SARS-COV-2 infection naturally or a SARS-COV-2-like infection naturally; (4) reducing the severity of a natural SARS-COV-2 disease or natural SARS-COV-2-like disease in a subject; or (5) treating a subject having a natural SARS-COV-2 infection or natural SARS-COV-2-like infection.

[0112] According to a tenth embodiment of the present invention, there is provided: a live attenuated SARS-COV-2, SARS-COV-2, SARS-COV-2 particle or SARS-COV-2 nucleic acid of the first embodiment; a recombinant, isolated or substantially purified nucleic acid of the second embodiment; a vector, plasmid or genetic construct of the third embodiment; a cell or isolate of the fourth embodiment; a vaccine of the fifth embodiment; a pharmaceutical preparation of the sixth embodiment; or an immunogenic composition of the seventh embodiment, for use in: (1) vaccinating a subject; (2) prophylactically immunizing a subject against SARS-COV-2 or SARS-COV-2-like virus; (3) preventing a subject from contracting a SARS-COV-2 infection naturally or a SARS-COV-2-like infection naturally; (4) reducing the severity of a natural SARS-COV-2 disease or natural SARS-COV-2-like disease in a subject; or (5) treating a subject having a natural SARS-COV-2 infection or natural SARS-COV-2-like infection.

[0113] According to an eleventh embodiment of the present invention, there is provided a method of generating a live attenuated SARS-COV-2 vaccine, SARS-COV-2, SARS-COV-2 particle or SARS-COV-2 nucleic acid, or recombinant, isolated or substantially purified nucleic acid comprising a partly codon deoptimized SARS-COV-2 genome or partly codon deoptimized region thereof, comprising the step of partly codon deoptimizing a SARS-COV-2 genome.

[0114] According to a twelfth embodiment of the present invention, there is provided a method of preparing a vaccine comprising live attenuated SARS-COV-2, said method comprising the steps of: (1) codon deoptimizing a SARS-COV-2 genome to produce a partly codon deoptimized live attenuated SARS-COV-2; and (2) enabling the partly codon deoptimized live attenuated SARS-COV-2 to replicate.

[0115] According to a thirteenth embodiment of the present invention, there is provided a method of preparing a vaccine comprising codon deoptimized SARS-COV-2, said method comprising the steps of: optionally, (1) codon deoptimizing a SARS-COV-2 genome to produce a partly codon deoptimized live attenuated SARS-COV-2; (2) enabling the partly codon deoptimized live attenuated SARS-COV-2 to replicate; and (3) preparing a vaccine dose containing the replicated SARS-COV-2 of step (2).

[0116] According to a fourteenth embodiment of the present invention, there is provided a method of eliciting an immune response in a subject, said method comprising the step of administering a live attenuated SARS-COV-2, SARS-COV-2, SARS-COV-2 particle or SARS-CoV-2 nucleic acid of the first embodiment; the recombinant, isolated or substantially purified nucleic acid of the second embodiment; the vector, plasmid or genetic construct of the third embodiment; the cell or isolate of the fourth embodiment; the vaccine of the fifth embodiment; the pharmaceutical preparation of the sixth embodiment; or the immunogenic composition of the seventh embodiment to the subject to thereby elicit an immune response.

[0117] It is to be appreciated that, context permitting, features of the above fourteen invention embodiments can be found elsewhere in this specification, including below.

[0118] By ‘live attenuated’ it is meant that the virus demonstrates substantially reduced or preferably no clinical signs of disease when administered to a subject, compared with wild-type SARS-COV-2.

[0119] ‘Wild-type SARS-COV-2’ refers to the Wuhan strain, found at https://www.ncbi.nlm.nih.gov/nuccore/1798174254.

[0120] It is to be appreciated that, context permitting, wild-type SARS-COV-2 can include natural variants (present and future) of the Wuhan strain, including: Alpha, Pango lineage B.1.1.7; Beta, Pango lincages B.1.351, B.1.351.2, B.1.351.3; Gamma, Pango lineages P.1, P.1.1, P.1.2; Delta, Pango lincages B.1.617.2, AY.1, AY.2; Eta, Pango lineage B.1.525; Iota, Pango lineage B.1.526; Kappa, Pango lincage B.1.617.1; Lambda, Pango lineage C.37; and, Pango lincages B.1.427, B.1.429, P.2, P.3, R.1, R.2, B.1.466.2, B.1.621, AV.1, B.1.1.318, B.1.1.519, AT.1, C.36.3, C.36.3.1, B.1.214.2.

[0121] Any suitable region or regions of the SARS-COV-2 genome can be codon deoptimized. The wild-type Wuhan SARS-COV-2 genome sequence, gene sequences and protein sequences can be found in GenBank as entry NCBI Reference Sequence: NC_045512.2 (Severe acute respiratory syndrome coronavirus 2 isolate Wuhan-Hu-1, complete genome). Those sequence are incorporated herein by reference.

[0122] In some embodiments the ORF1a region is codon deoptimized. The wild-type ORF1a sequence can be found in GenBank as entry NCBI Reference Sequence: NC_045512.2. The genome sequence, gene sequences and protein sequences are incorporated herein by reference.

[0123] In some embodiments the ORF1a region is codon deoptimized, but excluding/truncating the 5′ region by one or more nucleotides. In some embodiments the ORF1a region is codon deoptimized, but excluding/truncating the 3′ region of ORF1a by one or more nucleotides, thereby excluding the ribosomal frameshift region. In some embodiments, this corresponds between about nucleotide position 1534 to about nucleotide position 8586 of the Wuhan virus genome, but this need not be the case. These positions were chosen by the inventors in view of the cloning strategy. Other positions can be readily determined by the skilled person based on NCBI Reference Sequence: NC_045512.2. In some embodiments, only part of the ORF1a region of the viral genome is codon deoptimized or different parts or sub-regions of the ORF1a region of the viral genome are codon deoptimized.

[0124] Any suitable number of codon changes can be made. In some embodiments, CD results in no less than about 10 codon changes in ORF1a. In some embodiments, CD results in no more than about 1850 codon changes in ORF1a (with the upper limit for substitution being where the virus does not usually grow at all). In some embodiments, codon deoptimization results in between about 10 and about 1850 codon changes in ORF1a and all sub-ranges there between. This 10 to 1850 codon change range includes all integers between 10 and 1850 including 11, 12 . . . 1849 codon changes. In some embodiments, some or all of the codon changes can be situated immediately next to one another, in sequence. In some embodiments, some or all of the codon changes can be spaced apart from each other such that they are not situated immediately next to one another, in sequence—e.g. 3 to 4 codon (triplet) spacing. In some embodiments, some of the codon changes can be spaced apart from each other and some of the codon changes can be situated immediately next to one another.

[0125] In some embodiments, CD occurs in no more than about a 12 kbp nucleotide region of ORF1a. This can include an about 0.5, 1, 1.5, 2, 2.5, 3, 3.5, 4, 4.5, 5, 5.5, 6, 6.5, 7, 7.5, 8, 8.5, 9, 9.5, 10, 10.5, 11, 11.5 or 12 kbp nucleotide codon deoptimized region. The region can be continuous/contiguous or not. In some embodiments, CD occurs in a continuous ORF1a region with a length of about 12 kbp. In some embodiments, CD results in about an 11,186 nucleotide region of ORF1a, preferably with no less than about 10 codon changes within that nucleotide region. In some embodiments, about 10, 11, 12, 13, 14, 15, 16, 17, 18, 19, 20, 21, 22, 23, 24, 25, 26, 27, 28, 29, 30, 31, 32, 33, 34, 35, 36, 37, 38, 39, 40, 41, 42, 43, 44, 45, 46, 47, 48, 49 or 50% of ORF1a is codon deoptimized. In some embodiments, about 35% of ORF1a is codon deoptimized. In some embodiments, every 3^{rd} or 4^{th} codon is deoptimized along ORF1a.

[0126] Most amino acids are encoded by more than one codon. For instance, leucine, serine and arginine are encoded by six different codons, while only tryptophan and methionine have unique codons. ‘Synonymous’ codons are codons that encode the same amino acid. For example, CTT, CTC, CTA, CTG, TTA and TTG are synonymous codons that code for leucine. Synonymous codons are not used with equal frequency. In generally, the most frequently used codons in a particular organism are those for which the cognate tRNA is abundant, and the use of these codons enhances the rate and/or accuracy of protein translation. Conversely, tRNAs for the rarely used codons are found at relatively low levels, and the use of rare codons is thought to reduce translation rate and/or accuracy.

[0127] As used herein, a ‘rare’ codon is one of at least two synonymous codons encoding a particular amino acid that is present in an mRNA at a significantly lower frequency that the most frequently used codon for that amino acid. Conversely, a ‘frequent’ codon is one of at least two synonymous codons encoding a particular amino acid that is present in an mRNA at a significantly higher frequency that the least frequently used codon for that amino acid. For example, human genes use the leucine codon CTG 3.9% of the time, but use the synonymous codon CTA only 0.7% of the time. See Table 1a. Thus, CTG is a frequent codon, whereas CTA is a rare codon.

TABLE 1a
Codon usage in Homo sapiens (source:
http://www.kazusa.or.jp/codon/)

| Amino Acid | Codon | Frequency % |
|---|---|---|
| Gly | GGG | 1.65 |
| Gly | GGA | 1.65 |
| Gly | GGT | 1.08 |
| Gly | GGC | 2.22 |
| Glu | GAG | 3.96 |
| Glu | GAA | 2.90 |
| Asp | GAT | 2.18 |
| Asp | GAC | 2.51 |
| Val | GTG | 2.81 |
| Val | GTA | 0.71 |
| Val | GTT | 1.10 |
| Val | GTC | 1.45 |
| Ala | GCG | 0.74 |
| Ala | GCA | 1.58 |
| Ala | GCT | 1.85 |
| Ala | GCC | 2.77 |
| End | AGG | 1.20 |
| End | AGA | 1.22 |
| Ser | AGT | 1.21 |
| Ser | AGC | 1.95 |
| Lys | AAG | 3.19 |
| Lys | AAA | 2.44 |
| Asn | AAT | 1.70 |
| Asn | AAC | 1.91 |
| Met | ATG | 2.20 |
| Met | ATA | 0.75 |
| Ile | ATT | 1.60 |
| Ile | ATC | 2.08 |
| Thr | ACG | 0.61 |
| Thr | ACA | 1.51 |
| Thr | ACT | 1.31 |
| Thr | ACC | 1.89 |
| Trp | TGG | 1.32 |
| Trp | TGA | 0.16 |
| Cys | TGT | 1.06 |
| Cys | TGC | 1.26 |
| End | TAG | 0.08 |
| End | TAA | 0.10 |
| Tyr | TAT | 1.22 |
| Tyr | TAC | 1.53 |
| Leu | TTG | 1.29 |
| Leu | TTA | 0.77 |
| Phe | TTT | 1.76 |
| Phe | TTC | 2.03 |
| Ser | TCG | 0.44 |
| Ser | TCA | 1.22 |
| Ser | TCT | 1.52 |
| Ser | TCC | 1.77 |
| Arg | CGG | 1.14 |
| Arg | CGA | 0.62 |
| Arg | CGT | 0.45 |
| Arg | CGC | 1.04 |
| Gln | CAG | 3.42 |
| Gln | CAA | 1.23 |
| His | CAT | 1.09 |
| His | CAC | 1.51 |
| Leu | CTG | 3.96 |
| Leu | CTA | 0.72 |
| Leu | CTT | 1.32 |
| Leu | CTC | 1.96 |
| Pro | CCG | 0.69 |
| Pro | CCA | 1.69 |
| Pro | CCT | 1.75 |
| Pro | CCC | 1.98 |

[0128] ‘Rare codons’ have a frequency of less than 0.5%. For example, TAA, TGA, TCG and CGT are rare codons. ‘Less rare’ codons have a frequency of less than 0.8%. For example, AUA, ACG, CGA, CCG, CTA, CTA, GCG, ATA, TTA are less rare codons. ‘Moderate codons’ have a frequency of less than 2%. For example, CGC, TGT, GGT, CAT, GTT, CGG, AGG, AGT, AGA, TAT, TCA, CAA, TGC, TTG, ACT, TGG, CTT, GTC, CAC, ACA, TCT, TAC, GCA, ATT, GGG, GGA, CCA, AAT, CCT, TTT, TCC, GCT, ACC, AAC, AGC, CTC and CCC are moderate codons. ‘Frequent codons’ have a frequency of more than 2%. For example, TTC, ATC, GAT, ATG, GGC, AAA, GAC, GCC, GTG, GAA, AAG, CAG, GAG and CTG are frequent codons.

[0129] The propensity for highly expressed genes to use frequent codons is called ‘codon bias’. A gene for a ribosomal protein might use only the 20 to 25 most frequent of the 61 codons, and have a high codon bias (a codon bias close to 1), while a poorly expressed gene might use all 61 codons, and have little or no codon bias (a codon bias close to 0). It is thought that the frequently used codons are codons where larger amounts of the cognate tRNA are expressed, and that use of these codons allows translation to proceed more rapidly, or more accurately, or both.

[0130] In some embodiments, the CD results in slower non-structural polyprotein translation leading to slower replication and, as a result, in attenuation of the virus. In some embodiments, every codon in the wild-type ORF1a or region thereof was analysed in terms of its usage frequency in Homo sapiens, and if the codon was frequent then it was changed in the viral genome to a least frequently or less frequently used synonymous codon. In some embodiments, a codon for an amino acid with codon degeneracy was changed only if the synonymous codons for that amino acid occurred in significantly different frequencies of usage in the genome of Homo sapiens. In some embodiments, Asp, and Asn codons of the viral genome are left unchanged. In some embodiments, a codon for an amino acid with high codon degeneracy was changed to a synonymous codon that was rarely, less rarely or moderately used in the genome of Homo sapiens. In some embodiments, a viral region most rich in codons that can be substituted for rare codon variants is CD.

[0131] In some embodiments, CD results in replacement with one or more rare codons.

[0132] In some embodiments, CD results in replacement with one or more less rare codons.

[0133] In some embodiments, CD results in replacement with one or more moderate codons.

[0134] In some embodiments, CD results in replacement with one or more rare codons, one or more less rare codons, or one or more moderate codons, or any combination of these.

[0135] In some embodiments, CD results in replacement with one or more CpG dinucleotides (CpG elements).

[0136] In some embodiments, CD results in replacement with one or more UpA (TA) dinucleotides (UpA elements).

[0137] In some embodiments, CD results in replacement with one or more CpG and one or more UpA dinucleotides/elements, or any combination of these.

[0138] In some embodiments, CD results in replacement with one or more rare codons, one or more less rare codons, or one or more moderate codons, one or more CpG dinucleotides/elements, one or more UpA dinucleotides/elements, or any combination of these.

[0139] UpA and CpG dinucleotides can act as a vaccine adjuvant as they are important immunoregulators for the RNA virus immune response. In some embodiments, CpG and/or UpA improve the function of antigen-presenting cells, boost the generation of a vaccine-specific immune response and increase the immunogenicity of administered vaccines. Rare serine codon TCG contains a CpG dinucleotide. Less rare codons CTA, CCG, ACG, GTA, ATA and GCG contain UpA or CpG dinucleotides/elements.

[0140] In some embodiments, one or more serine codons are changed. In some embodiments, one or more serine codons are changed to the rare TCG codon. (This codon has the CpG element.)

[0141] In some embodiments, one or more proline codons are changed. In some embodiments, one or more proline codons are changed to the less rare CCG codon. (This codon has the CpG element.)

[0142] In some embodiments, one or more threonine codons are changed. In some embodiments, one or more threonine codons are changed to the less rare ACG codon. (This codon has the CpG element.)

[0143] In some embodiments, one or more isoleucine codons are changed. In some embodiments, one or more isoleucine codons are changed to the less rare ATA codon. (This codon has the UpA element.)

[0144] In some embodiments, one or more alanine codons are changed. In some embodiments, one or more alanine codons are changed to the less rare GCG codon. (This codon has the CpG element.)

[0145] In some embodiments, one or more arginine codons are changed. In some embodiments, one or more arginine codons are changed to the rare CGT codon or less rare CGA codon. (These codons have the CpG elements.)

[0146] In some embodiments, one or more serine codons are changed, one or more proline codons are changed, one or more threonine codons are changed, one or more isoleucine codons are changed, one or more alanine codons are changed, one or more arginine codons are changed, or any combination of these.

[0147] In some embodiments, a region between about nucleotide positions 1534 and 8586 of the SARS-COV-2 wild-type genome (the ORF1a region) can be codon deoptimized, or any subrange/subregion located between 1534 and 8586. Any suitable number of amino acid codon changes can be made. In some embodiments, a total of at least about 24 codons are changed. In some embodiments, a total of up to about 546 codons are changed. This includes all whole numbers between 24 and 546, including 24, 25 etc. This also includes all subranges between 24-546, such as 24-50, 50-75, 75-100, etc.

[0148] For example, one or more of the amino acid codons shown in Table 11 can be changed/mutated—either individually or in any suitable combination with each other. For example, one or more of the following amino acid codons shown in Table 1b below can be changed/mutated—either individually or in any suitable combination with each other (including different codons for the same amino acid and/or with codons for different amino acids).

TABLE 1b

| | | Number of codon changes in | Percentage of codon changes in |
|---|---|---|---|
| Amino | Change to | the 1534-8586 region for | the 1534-8586 region for that |
| acid | codon | that particular amino acid | particular amino acid |
| Ser | TCG, TCC | Approximately 0 to 160, | Approximately 0-100%, including |
| | TCT, TCA | including all integers between | all percentages between 0 and |
| | and/or AGT | 0 and 160, preferably at least | 100, preferably at least about |
| | | about 24, preferably no more | 15%, preferably no more than |
| | | than about 160. | about 100%. |
| Arg | CGT, AGG, | Approximately 0 to 43, | Approximately 0-100%, including |
| | CGG, CGC | including all integers between | all percentages between 0 and |
| | and/or CGA | 0 and 43, preferably at least | 100, preferably at least about |
| | | about 11, preferably no more | 26%, preferably no more than |
| | | than about 40. | about 93%. |
| Thr | ACG, ACA | Approximately 0 to 187, | Approximately 0-100%, including |
| | and/or ACT | including all integers between | all percentages between 0 and |
| | | 0 and 187, preferably at least | 100, preferably at least about |
| | | about 33, preferably no more | 18%, preferably no more than |
| | | than about 186. | about 99%. |
| Pro | CCG, CCT | Approximately 0 to 82, | Approximately 0-100%, including |
| | and/or CCA | including all integers between | all percentages between 0 and |
| | | 0 and 82, preferably at least | 100, preferably at least about |
| | | about 10, preferably no more | 12%, preferably no more than |
| | | than about 82. | about 100%. |
| Val | GTA, GTC | Approximately 0 to 165, | Approximately 0-100%, including |
| | and/or GTT | including all integers between | all percentages between 0 and |
| | | 0 and 165. | 100. |
| Leu | CTA, CTC, | Approximately 0 to 199, | Approximately 0-100%, including |
| | CTT, TTG | including all integers between | all percentages between 0 and |
| | and/or TTA | 0 and 199. | 100. |
| Ala | GCG, GCT | Approximately 0 to 147, | Approximately 0-100%, including |
| | and/or GCA | including all integers between | all percentages between 0 and |
| | | 0 and 147, preferably at least | 100, preferably at least about |
| | | about 34, preferably no more | 23%, preferably no more than |
| | | than about 147. | about 100%. |
| Ile | ATA and/or | Approximately 0 to 87, | Approximately 0-100%, including |
| | ATT | including all integers between | all percentages between 0 and |
| | | 0 and 87, preferably no more | 100, preferably no more than |
| | | than about 82. | about 94%. |
| Cys | TGT | Approximately 0 to 6, | Approximately 0-100%, including |
| | | including all integers between | all percentages between 0 and |
| | | 0 and 6. | 100. |
| Gly | GGT | Approximately 0 to 41, | Approximately 0-100%, including |
| | | including all integers between | all percentages between 0 and |
| | | 0 and 41, preferably at least | 100, preferably at least about |
| | | about 8, preferably no more | 20%, preferably no more than |
| | | than about 41. | about 100%. |
| His | CAT | Approximately 0 to 13, | Approximately 0-100%, including |
| | | including all integers between | all percentages between 0 and |
| | | 0 and 13. | 100. |
| Tyr | TAT | Approximately 0 to 43 | Approximately 0-100%, including |
| | | including all integers between | all percentages between 0 and |
| | | 0 and 43. | 100. |
| Gln | CAA | Approximately 0 to 28, | Approximately 0-100%, including |
| | | including all integers between | all percentages between 0 and |
| | | 0 and 28, preferably at least | 100, preferably at least about 4%, |
| | | about 1, preferably no more | preferably no more than about |
| | | than about 14. | 50%. |
| Trp | TGG | 0 | 0% |
| Asn | AAT | Approximately 0 to 38, | Approximately 0-100%, including |
| | | including all integers between | all percentages between 0 and |
| | | 0 and 38. | 100. |
| Phe | TTT | Approximately 0 to 22, | Approximately 0-100%, including |
| | | including all integers between | all percentages between 0 and |
| | | 0 and 22. | 100. |
| Asp | GAT | Approximately 0 to 39, | Approximately 0-100%, including |
| | | including all integers between | all percentages between 0 and |
| | | 0 and 39. | 100. |
| Met | ATG | 0 | 0% |
| Lys | AAA | Approximately 0 to 56, | Approximately 0-100%, including |
| | | including all integers between | all percentages between 0 and |
| | | 0 and 56. | 100. |
| Glu | GAA | Approximately 0 to 41, | Approximately 0-100%, including |
| | | including all integers between | all percentages between 0 and |
| | | 0 and 41. | 100. |

[0149] For example, in some embodiments, the 1534-8586 region can have about 24, 28, 25, 48, 53, 59, 77 or 160 Ser changes to Ser TCG.

[0150] For example, in some embodiments, the 1534-8586 region can have about 97 codon changes comprising: about 19 Ile changes to Ile ATA, about 10 Pro changes to Pro CCG, about 34 Thr changes to Thr ACG, and about 34 Ala changes to Ala GCG.

[0151] For example, in some embodiments, the codon deoptimized genome can have the deoptimized codons of the fragments/clones/vaccine candidates as shown or as substantially shown in any one of SEQ ID NO:1-31, 33-37 and 39-68, and as shown or as substantially shown in any one of FIGS. 8 to 12 and 22 to 25.

[0152] For example, in some embodiments, the codon deoptimized genome can have at least the deoptimized codons of the fragments/clones/vaccine candidates as shown in any one of SEQ ID NO:1-31, 33-37 and 39-68, and as shown or as substantially shown in any one of FIGS. 8 to 12 and 22 to 25.

[0153] For example, in some embodiments, the codon deoptimized genome can have fewer than the deoptimized codons of the fragments/clones/vaccine candidates as shown in any one of SEQ ID NO: 1-31, 33-37 and 39-68, and as shown or as substantially shown in any one of FIGS. 8 to 12 and 22 to 25.

[0154] For example, in some embodiments, the codon deoptimized genome can have anywhere between about 10% and about 100% of the deoptimized codons of the fragments/clones/vaccine candidates as shown in any one of SEQ ID NO: 1-31, 33-37 and 39-68, and as shown in any one of FIGS. 8 to 12 and 22 to 25, said 10% to 100% range including all integers between 10 and 100, including 11, 12 etc.

[0155] In some embodiments, the codon deoptimized genome has the deoptimized region or genomic sequence or substantially the same deoptimized region or genomic sequence of clone SARS-COV-2-77-1, SARS-COV-2-77-2, SARS-COV-2-77-3, SARS-COV-2-77-4, SARS-COV-2-77-5, SARS-COV-2-77-6, SARS-COV-2-77-7, SARS-COV-2-160-1, SARS-COV-2-160-2, SARS-COV-2-160-3, SARS-COV-2-160-4, SARS-COV-2-160-5, SARS-COV-2-160-6, SARS-COV-2-160-7, SARS-COV-2-4N-1 or SARS-COV-2-7N-1, or variant thereof.

[0156] In some embodiments, the codon deoptimized genome has the deoptimized region or genomic sequence of clone SARS-COV-2-4N-1, SARS-COV-2-7N-1, SARS-COV-2-77-7, SARS-COV-2-160-4 or SARS-COV-2-160-7, or substantially the same deoptimized region or genomic sequence as clone SARS-COV-2-4N-1, SARS-COV-2-7N-1, SARS-COV-2-77-7, SARS-COV-2-160-4 or SARS-COV-2-160-7, or variant thereof.

[0157] In some embodiments, the codon deoptimized genome has the deoptimized region or genomic sequence of clone SARS-COV-2-7N-1 or substantially the same deoptimized region or genomic sequence as clone SARS-COV-2-7N-1, or variant thereof.

[0158] In some embodiments, apart from the deoptimized region, a genomic remainder, or part thereof, of the live attenuated severe acute respiratory syndrome coronavirus 2 (SARS-CoV-2), SARS-COV-2, SARS-COV-2 particle or SARS-COV-2 nucleic acid etc can comprise a sequence identical to, substantially identical to or similar to wild-type SARS-COV-2—i.e. the Wuhan isolate or variant thereof. Suitable variants include present and future variants of the Wuhan strain, including: Alpha, Pango lineage B.1.1.7; Beta, Pango lineages B.1.351, B.1.351.2, B.1.351.3; Gamma, Pango lincages P.1, P.1.1, P.1.2; Delta, Pango lineages B.1.617.2, AY.1, AY.2; Eta, Pango lineage B.1.525; Iota, Pango lineage B.1.526; Kappa, Pango lineage B.1.617.1; Lambda, Pango lineage C.37; and, Pango lineages B.1.427, B.1.429, P.2, P.3, R.1, R.2, B.1.466.2, B.1.621, AV.1, B.1.1.318, B.1.1.519, AT.1, C.36.3, C.36.3.1, B.1.214.2. Typically, a variant will include a mutated Spike gene.

[0159] In some embodiments of the genomic remainder, for example, for the live attenuated severe acute respiratory syndrome coronavirus 2 (SARS-COV-2), SARS-COV-2, SARS-COV-2 particle or SARS-COV-2 nucleic acid etc, the Spike gene (or part thereof) of the Wuhan strain can be replaced with the Spike gene of Alpha, Beta, Gamma or Delta variants. All of these can have the Wuhan isolate backbone with the only changes being in the sequence of the Spike gene.

[0160] In some embodiments, apart from the deoptimized region, a genomic remainder, or part thereof, of the live attenuated severe acute respiratory syndrome coronavirus 2 (SARS-CoV-2), SARS-COV-2, SARS-COV-2 particle or SARS-COV-2 nucleic acid etc can comprise a sequence of a genetically modified, recombinant or manufactured SARS-COV-2 genome.

[0161] In some embodiments, the chance of deattenuation to wild-type SARS-COV-2 is negligible.

[0162] In some embodiments, a recombinant/recombined ORF1a region can be used. In some embodiments, the ORF1a region can be cleaved into at least two, three, four, five, six, seven, eight, nine, ten or more fragments. Preferably, the ORF1a region can be cleaved into at least about three fragments. These ORF1a fragments can be generated using, for example, restriction enzymes. Suitable restriction enzymes include, for example, SanDI, SmaI, AvrII, PacI, SphI and PshAI. Deoptimized fragments can be generated using gene synthesis and restriction enzyme sites as described in FIGS. 4 and 15. Other restriction enzyme sites within ORF1a can be used for generating fragments and can be identified using sequence analysis software.

[0163] Any one or more of the ORF1a fragments can be codon deoptimized to any suitable degree. ORF1a can be codon deoptimized prior to being fragmented. Alternatively, ORF1a can be codon deoptimized after being fragmented (or sub-fragmented). A suitable fragment or sub-fragment of ORF1a or fragments or sub-fragments of ORF1a that can be codon deoptimized are shown in FIGS. 2, 3, 14 and 15.

[0164] The wild-type fragments and/codon deoptimized fragments can be assembled/ligated together in their natural five to three prime order to create a recombinant/genetically engineered ORF1a having 1, 2, 3 or more codon deoptimized fragment regions. For example, three wild-type and three codon deoptimized fragments can be assembled in different combinations to generate 7 different ORF1a fragment combinations (in addition to wildtype).

[0165] In some embodiments, the vaccine can comprise a single clone/vaccine candidate, for example, having the sequence shown in any one of SEQ ID NOs:39-68. In some embodiments, the vaccine can comprise a combination of 2, 3, 4, 5, 6, 7, 8, 9, 10, 11, 12, 13, 14. 15, 16, 17, 18, 19, 20, 21, 22, 23, 24, 25, 26, 27 or 28 clones/vaccine candidates having, for example, sequences shown in any one of SEQ ID NOs:39-68.

[0166] In some embodiments, the vaccine can comprise, for example, one or more of clones SARS-COV-2-77-1, SARS-COV-2-77-2, SARS-COV-2-77-3, SARS-COV-2-77-4, SARS-COV-2-77-5, SARS-COV-2-77-6, SARS-COV-2-77-7, SARS-COV-2-160-1, SARS-COV-2-160-2. SARS-COV-2-160-3, SARS-COV-2-160-4, SARS-COV-2-160-5, SARS-COV-2-160-6, SARS-COV-2-160-7. SARS-COV-2-4N-1 and SARS-COV-2-7N-1, or variant thereof.

[0167] In some embodiments, the vaccine can comprise one or more of clones SARS-CoV-2-4N-1 and SARS-COV-2-7N-1, or variant thereof.

[0168] As mentioned, any suitable region or regions of the SARS-COV-2 genome can be codon deoptimized. In some embodiments, the region of the SARS-COV-2 genome encoding the envelope structural protein (E protein) is codon deoptimized. (Wild type E protein is shown as SEQ ID NO:38.) In some embodiments, both E protein and ORF1a are codon deoptimized. In some embodiments, only part of E protein or all of E protein of the viral genome is codon deoptimized or different parts or sub-regions of E protein of the viral genome are codon deoptimized.

[0169] In some embodiments, the E protein putative transmembrane domain is codon deoptimized. In some embodiments, the E protein putative C-terminal protein-protein interaction motif is codon deoptimized. In some embodiments, both the E protein putative transmembrane domain and putative C-terminal protein-protein interaction motif are codon deoptimized.

[0170] In some embodiments, CD results in between about 1 and about 75 codon changes in E protein. The 1 to 75 codon change range includes all integers between 1 and 75 including 2, 3 . . . 74 codon changes. In some embodiments, some or all of the codon changes can be situated immediately next to one another, in sequence. In some embodiments, some or all of the codon changes can be spaced apart from each other such that they are not situated immediately next to one another, in sequence—e.g. 3 to 4 codon (triplet) spacing. In some embodiments, some of the codon changes can be spaced apart from each other and some of the codon changes can be situated immediately next to one another.

[0171] In some embodiments, CD results in between 1 and about 160 codon changes in E protein. The 1 to 160 codon change range includes all integers between 1 and 160 including 2. 3 . . . 159 codon changes. In some embodiments, some or all of the codon changes are of serine to TCG. Preferably there are 77 codon or 160 codon changes of serine to TCG.

[0172] In some embodiments, CD results in between 1 and about 496 codon changes in E protein. The 1 to 496 codon change range includes all integers between 1 and 496 including 2, 3 . . . 495 codon changes. In some embodiments, some of the codon changes are of proline to CCG, and preferably there are 81 proline codons deoptimized to CCG. In some embodiments, some of the codon changes are of threonine to ACG, and preferably there are 186 threonine codons deoptimized to ACG. In some embodiments, some of the codon changes are of isoleucine to ATA, and preferably there are 82 isoleucine codons deoptimized to ATA. In some embodiments, some of the codon changes are of alanine to GCG, and preferably there are 147 alanine codons deoptimized to GCG. In some embodiments, the codon changes are any combination thereof.

[0173] In some embodiments, CD results in between 1 and about 546 codon changes in E protein. The 1 to 546 codon change range includes all integers between 1 and 546 including 2. 3 . . . 545 codon changes. In some embodiments, some of the codon changes are of proline to CCG, and preferably there are 82 proline codons deoptimized to CCG. In some embodiments, some of the codon changes are of threonine to ACG, and preferably there are 178 threonine codons deoptimized to ACG. In some embodiments, some of the codon changes are of isoleucine to ATA, and preferably there are 44 isoleucine codons deoptimized to ATA. In some embodiments, some of the codon changes are of alanine to GCG, and preferably there are 147 alanine codons deoptimized to GCG. In some embodiments, some of the codon changes are of arginine to CGT, and preferably there are 40 arginine codons deoptimized to CGT. In some embodiments, some of the codon changes are of glycine to GGT, and preferably there are 41 glycine codons deoptimized to GGT. In some embodiments, some of the codon changes are of glutamine to CAA, and preferably there are 14 glutamine codons deoptimized to CAA. In some embodiments, the codon changes are any combination thereof.

[0174] In some embodiments, CD of E protein results in reduced neurovirulence.

[0175] The live attenuated SARS-COV-2, SARS-COV-2, SARS-COV-2 particle or SARS-CoV-2 nucleic acid comprising a partly codon deoptimized SARS-COV-2 genome can be of any suitable form and can be prepared in any suitable way. Likewise, the recombinant, isolated or substantially purified nucleic acid comprising a partly codon deoptimized SARS-COV-2 genome or partly codon deoptimized region thereof can be prepared in any suitable way. Such techniques are described elsewhere in this specification (e.g. see below), the entire contents of which are incorporated herein by way of reference.

[0176] Likewise, a vaccine, vaccination dose, pharmaceutical preparation or immunogenic composition comprising the above can be of any suitable form and can be prepared in any suitable way. Such techniques are described elsewhere in this specification, the entire contents of which are incorporated herein by way of reference.

[0177] In addition to a live attenuated SARS-COV-2 vaccine, pharmaceutical preparation or immunogenic composition, the present invention encompasses SARS-COV-2 particles, nucleic acid and genetic vaccines that comprise a partly codon deoptimized SARS-COV-2 genome in the form of a nucleic acid. The nucleic acid can be DNA or RNA that is self-replicating/self-amplifying once used for vaccination. The nucleic acid can relate to the SARS-CoV-2 genome or SARS-COV-2 anti-genome. The nucleic acid can relate to positive-sense genomic RNA, negative-strand genomic RNA, or cDNA encoding the SARS-COV-2 genome. Such techniques are described in the following references, the entire contents of which are incorporated herein by way of cross-reference: (Karl Ljungberg & Peter Liljeström (2015) Self-replicating alphavirus RNA vaccines, Expert Review of Vaccines, 14:2, 177-194, DOI: 10.1586/14760584.2015.965690; Rodríguez-Gascón A, del Pozo-Rodríguez A, Solinís MA (2014) Development of nucleic acid vaccines: use of self-amplifying RNA in lipid nanoparticles. Int J Nanomedicine. 9: 1833-1843; US 2014/0112979 A1.

[0178] The vaccine, pharmaceutical preparation or immunogenic composition can comprise live virus or temporarily inactivated virus, provided that it is self-replicating/self-amplifying after vaccination. If inactivated, it can be inactivated in any suitable way (e.g. using high or low temperatures, radiation or chemically).

[0179] The vaccine, pharmaceutical preparation or immunogenic composition can comprise a delivery system or carrier or aid, and these can be of any suitable form and can be prepared in any suitable way. Suitable examples include a plasmid, genetic construct or vector to assist with self-replication/self-amplification, an RNA nanocarrier for RNA delivery, and lipid-based formulations for delivery, including liposomes, nanoemulsions and solid lipid nanoparticles.

[0180] In some embodiments, the vaccine can be prepared by way of passing SARS-COV-2 through a filter, such as a 0.22 μm hydrophilic PVDF membrane or hydrophilic Polyethersulfone membrane.

[0181] Manufacturing a vaccine can comprise growing/propagating the virus in Vero cells or Vero E6 cells. These cells can be used in large-scale bioreactors. However, it may be possible to grow the virus using other cell types, tissue culture methods and mediums.

[0182] In some embodiments, the vaccine can be stored long term and remain viable at a temperature of between about 2° C. and about −80° C. (including all 1 degree increments between 2 and −80, including 1, 0, −1, −2 . . . −79). By “long-term” it is meant that the vaccine can remain viable for at least 30, 31, 32, 33, 34, 35, 36, 37, 38, 39, 40, 41, 42, 43, 44, 45, 46, 47, 48, 49, 50, 51, 52, 53, 54, 55, 56, 57, 58, 59 or 60 days. In some embodiments, it is possible that the vaccine can remain viable for more than 60 days. In some embodiments, it is possible that the vaccine can remain viable for 1 year, 2 years or more, especially if freeze dried and stored at 2-8 degrees Celsius.

[0183] The live attenuated virus can be in the form of an isolate. The isolate may comprise cells, such as mammalian or other types of cells—e.g. Vero cells.

[0184] The method of preventing the subject from contracting a viral infection, treating a subject having a viral infection, or reducing the severity of a viral disease, can be carried out in any suitable way.

[0185] A ‘SARS-COV-2-like virus’ as used herein refers to a virus closely related to SARS-COV-2. SARS-COV-2 natural variants, SARS COV 1, MERS-COV and other human coronaviruses, especially betacoronaviruses, may be closely related viruses.

[0186] A ‘SARS-COV-2-like infection’ as used herein refers to an infection caused by a virus closely related to SARS-COV-2.

[0187] A ‘SARS-COV-2-like disease’ as used herein refers to a disease caused by a virus closely related to SARS-COV-2, including betacoronaviruses. Severe acute respiratory syndrome 1 (SARS 1) and Middle-East respiratory syndrome (MERS) are examples of SARS-CoV-2-like diseases.

[0188] The vaccine, live attenuated virus, pharmaceutical preparation and immunogenic composition (described hereafter as “the compositions”) can be administered independently, either systemically or locally, by any method standard in the art, for example, subcutaneously, intravenously, parenterally, intraperitoneally, intradermally, intramuscularly, topically, orally or nasally. The compositions are preferably administered subcutaneously.

[0189] The compositions can comprise conventional non-toxic, physiologically or pharmaceutically acceptable ingredients or vehicles suitable for the method of administration and are well known to an individual having ordinary skill in this art. If required, the compositions can, for example, comprise an adjuvant. The adjuvant can be, for example, an aluminium salt (e.g. aluminium hydroxide), monophosphoryl lipid A, or emulsion of water and oil (e.g. MF59). In some embodiments, no adjuvant is required. The term “pharmaceutically acceptable carrier” as used herein is intended to include diluents such as saline and aqueous buffer solutions. The compositions can be in aqueous, lyophilized, freeze-dried or frozen form. If freeze-dried, the composition can be reconstituted with diluent.

[0190] A variety of devices are known in the art for delivery of the compositions including, but not limited to, syringe and needle injection, bifurcated needle administration, administration by intradermal patches or pumps, intradermal needle-free jet delivery (intradermal etc.), intradermal particle delivery, or aerosol powder delivery.

[0191] The compositions can be administered independently one or more times to achieve, maintain or improve upon a desired effect/result. It is well within the skill of an artisan to determine dosage or whether a suitable dosage of the composition comprises a single administered dose or multiple administered doses. An appropriate dosage depends on the subject's health, the induction of immune response and/or prevention of infection caused by the SARS-COV-2, the route of administration and the formulation used. For example, a therapeutically active amount of the compound may vary according to factors such as the disease state, age, sex, and weight of the subject, and the ability of the composition to elicit a desired response in the subject. Dosage regime may be adjusted to provide the optimum therapeutic response. For example, a subject may be administered a ‘booster’ vaccination one, two, three, four or more weeks following the initial administration. For example, a subject may be administered a titre of 10⁴ PFU attenuated virus per dose.

[0192] The vector, plasmid or genetic construct can also be prepared in any suitable way. Suitably, the genetic construct is in the form of, or comprises genetic components of, a plasmid, bacteriophage, a cosmid, a yeast or bacterial artificial chromosome as are well understood in the art. Genetic constructs may also be suitable for maintenance and propagation of the nucleic acid in bacteria or other host cells, for manipulation by recombinant DNA technology. For the purposes of protein expression, the genetic construct is an expression construct. Suitably, the expression construct comprises the one or more nucleic acids operably linked to one or more additional sequences, such as heterologous sequences, in an expression vector. An “expression vector” may be either a self-replicating extra-chromosomal vector such as a plasmid, or a vector that integrates into a host genome. By “operably linked” is meant that said additional nucleotide sequence(s) is/are positioned relative to the nucleic acid of the invention preferably to initiate, regulate or otherwise control transcription. Regulatory nucleotide sequences will generally be appropriate for the host cell or tissue where expression is required. Numerous types of appropriate expression vectors and suitable regulatory sequences are known in the art for a variety of host cells. Typically, said one or more regulatory nucleotide sequences may include, but are not limited to, promoter sequences, leader or signal sequences, ribosomal binding sites, transcriptional start and termination sequences, translational start and termination sequences, and enhancer or activator sequences. Constitutive or inducible promoters as known in the art are contemplated by the invention. The expression construct may also include an additional nucleotide sequence encoding a fusion partner (typically provided by the expression vector) so that the recombinant protein of the invention is expressed as a fusion protein. In some embodiments the genetic construct is suitable for virus production and in other embodiments for DNA vaccination of a mammal, such as a human.

[0193] The cell (mammalian or other) or isolate comprising the vector, plasmid, genetic construct or virus can be prepared in any suitable way.

[0194] Suitable protocols for carrying out one or more of the above-mentioned techniques can be found in “Current Protocols in Molecular Biology”. July 2008, JOHN WILEY AND SONS; D. M. WEIR ANDCC BLACKWELL, “Handbook Of Experimental Immunology”, vol. I-IV. 1986; JOHN E. COLIGAN, ADA M. KRUISBEEK, DAVID H. MARGULIES, ETHAN M. SHEVACH, WARREN STROBER, “Current Protocols in Immunology”, 2001, JOHN WILEY & SONS; “Immunochemical Methods In Cell And Molecular Biology”, 1987, ACADEMIC PRESS; SAMBROOK ET AL., “Molecular Cloning: A Laboratory Manual, 3d cd.,”, 2001, COLD SPRING HARBOR LABORATORY PRESS; “Vaccine Design, Methods and Protocols”, Volume 2, Vaccines for Veterinary Diseases, Sunil Thomas in Methods in Molecular Biology (2016); and, “Vaccine Design, Methods and Protocols”, Volume 1: Vaccines for Human Diseases, Sunil Thomas in Methods in Molecular Biology (2016), the entire contents of which are incorporated herein by way of reference.

[0195] Any suitable type of subject can be used. The subject can be any suitable mammal. Mammals include humans, primates, livestock and farm animals (e.g. horses, sheep and pigs), companion animals (e.g. dogs and cats), and laboratory test animals including rats, mice, rabbits, hamsters and ferrets, including transgenic animals (e.g. human ACE2 receptor transgenic mice). The subject can be a bat, pangolin or other wild animal that could be a host for the coronavirus. The subject is preferably human.

[0196] ‘Nucleic acid’ as used herein includes ‘polynucleotide’, ‘oligonucleotide’, and ‘nucleic acid molecule’, and generally means a polymer of DNA or RNA, which can be single-stranded or double-stranded, synthesized or obtained (e.g. isolated and/or purified) from natural sources, which can contain natural, non-natural or altered nucleotides, and which can contain a natural, non-natural or altered internucleotide linkage, such as a phosphoroamidate linkage or a phosphorothioate linkage, instead of the phosphodiester found between the nucleotides of an unmodified oligonucleotide.

[0197] As used herein, context permitting, the term ‘recombinant’ refers to (i) molecules that are constructed outside living cells by joining natural or synthetic nucleic acid segments to nucleic acid molecules that can replicate in a living cell, or (ii) molecules that result from the replication of those described in (i) above. For purposes herein, the replication can be in vitro replication or in vivo replication. As used herein, context permitting, the term ‘recombinant’ refers to the condition of having been genetically modified. That is, a ‘recombinant virus genome’ means that the virus genome has been genetically engineered. In this sense: live attenuated SARS-COV-2 (comprising a partly codon deoptimized SARS-COV-2 genome) can be called recombinant live attenuated SARS-COV-2; SARS-COV-2 can be called recombinant SARS-COV-2; SARS-COV-2 particle can be called recombinant SARS-CoV-2 particle; and SARS-COV-2 nucleic acid can be called recombinant SARS-COV-2 nucleic acid.

[0198] The terms ‘isolated’ or ‘purified’ as used herein mean essentially free of association with other biological components/contaminants, e.g. as a naturally occurring protein that has been separated from cellular and other contaminants by the use of antibodies or other methods or as a purification product of a recombinant host cell culture. By ‘substantially the same’ or ‘substantially as shown’, it is meant that it is different yet essentially the same, differing in a minor way to make no significant practical or functional difference.

[0199] Amino acids are referred to herein interchangably by their name, IUPAC code or three letter code. See Table 1C.

TABLE 1C

| | | Three |
|---|---|---|
| | IUPAC | letter |
| Amino Acid | code | code |
| Alanine | A | Ala |
| Cysteine | C | Cys |
| Aspartic Acid | D | Asp |
| Glutamic Acid | E | Glu |
| Phenylalanine | F | Phe |
| Glycine | G | Gly |
| Histidine | H | His |
| Isoleucine | I | Ile |
| Lysine | K | Lys |
| Leucine | L | Leu |
| Methionine | M | Met |
| Asparagine | N | Asn |
| Proline | P | Pro |
| Glutamine | Q | Gln |
| Arginine | R | Arg |
| Serine | S | Ser |
| Threonine | T | Thr |
| Valine | V | Val |
| Tryptophan | W | Trp |
| Tyrosine | Y | Tyr |

[0200] Preferred embodiments of the invention are defined in the following numbered paragraphs:
[0201] 1. Live attenuated severe acute respiratory syndrome coronavirus 2 (SARS-COV-2), SARS-COV-2, SARS-COV-2 particle or SARS-COV-2 nucleic acid comprising a partly codon deoptimized SARS-COV-2 genome.
[0202] 2. A recombinant, isolated or substantially purified nucleic acid comprising a partly codon deoptimized SARS-COV-2 genome or partly codon deoptimized region thereof.
[0203] 3. A vector (or plasmid or genetic construct) containing the nucleic acid of the second paragraph.
[0204] 4. A cell or isolate containing the live attenuated SARS-COV-2, SARS-COV-2, SARS-COV-2 particle or SARS-COV-2 nucleic acid of the first paragraph, the nucleic acid of the second paragraph, or the vector (or plasmid or genetic construct) of the third paragraph.
[0205] 5. A vaccine comprising the live attenuated SARS-COV-2, SARS-COV-2, SARS-CoV-2 particle or SARS-COV-2 nucleic acid of the first paragraph, the recombinant, isolated or substantially purified nucleic acid of the second paragraph, the vector (or plasmid or genetic construct) of the third paragraph, or the cell or isolate of the fourth paragraph.
[0206] 6. A pharmaceutical preparation comprising the live attenuated SARS-COV-2, SARS-COV-2, SARS-COV-2 particle or SARS-COV-2 nucleic acid of the first paragraph, the recombinant, isolated or substantially purified nucleic acid of the second paragraph, the vector (or plasmid or genetic construct) of the third paragraph, or the cell or isolate of the fourth paragraph.
[0207] 7. An immunogenic composition comprising the live attenuated SARS-COV-2, SARS-COV-2, SARS-COV-2 particle or SARS-COV-2 nucleic acid of the first paragraph, the recombinant, isolated or substantially purified nucleic acid of the second paragraph, the vector (or plasmid or genetic construct) of the third paragraph, or the cell or isolate of the fourth paragraph.
[0208] 8. A method of: (1) vaccinating a subject; (2) prophylactically immunizing a subject against SARS-COV-2 or SARS-COV-2-like virus; (3) preventing a subject from contracting a SARS-COV-2 infection naturally or a SARS-COV-2-like infection naturally; (4) reducing the severity of a natural SARS-COV-2 disease or natural SARS-COV-2-like disease in a subject; or (5) treating a subject having a natural SARS-COV-2 infection or natural SARS-CoV-2-like infection, said method comprising the step of administering to the subject: the live attenuated SARS-COV-2, SARS-COV-2, SARS-COV-2 particle or SARS-COV-2 nucleic acid of the first paragraph; the recombinant, isolated or substantially purified nucleic acid of the second paragraph; the vector (or plasmid or genetic construct) of the third paragraph; the cell or isolate of the fourth paragraph; the vaccine of the fifth paragraph; the pharmaceutical preparation of the sixth paragraph; or the immunogenic composition of the seventh paragraph.
[0209] 9. Use of: the live attenuated SARS-COV-2, SARS-COV-2, SARS-COV-2 particle or SARS-COV-2 nucleic acid of the first paragraph; the recombinant, isolated or substantially purified nucleic acid of the second paragraph; the vector (or plasmid or genetic construct) of the third paragraph; the cell or isolate of the fourth paragraph; the vaccine of the fifth paragraph; the pharmaceutical preparation of the sixth paragraph; or the immunogenic composition of the seventh paragraph, in the preparation of a medicament for: (1) vaccinating a subject; (2) prophylactically immunizing a subject against SARS-COV-2 or SARS-COV-2-like virus; (3) preventing a subject from contracting a SARS-COV-2 infection naturally or a SARS-COV-2-like infection naturally; (4) reducing the severity of a natural SARS-COV-2 disease or natural SARS-COV-2-like disease in a subject; or (5) treating a subject having a natural SARS-COV-2 infection or natural SARS-COV-2-like infection.
[0210] 10. Live attenuated SARS-COV-2, SARS-COV-2, SARS-COV-2 particle or SARS-CoV-2 nucleic acid of the first paragraph; a recombinant, isolated or substantially purified nucleic acid of the second paragraph; a vector (or plasmid or genetic construct) of the third paragraph; a cell or isolate of the fourth paragraph; a vaccine of the fifth paragraph; a pharmaceutical preparation of the sixth paragraph; or an immunogenic composition of the seventh paragraph, for use in: (1) vaccinating a subject; (2) prophylactically immunizing a subject against SARS-COV-2 or SARS-COV-2-like virus; (3) preventing a subject from contracting a SARS-COV-2 infection naturally or a SARS-COV-2-like infection naturally; (4) reducing the severity of a natural SARS-COV-2 disease or natural SARS-COV-2-like disease in a subject; or (5) treating a subject having a natural SARS-COV-2 infection or natural SARS-CoV-2-like infection.
[0211] 11. A method of generating a live attenuated SARS-COV-2 vaccine, SARS-COV-2, SARS-COV-2 particle or SARS-COV-2 nucleic acid, or recombinant, isolated or substantially purified nucleic acid comprising a partly codon deoptimized SARS-COV-2 genome or partly codon deoptimized region thereof, comprising the step of partly codon deoptimizing a SARS-COV-2 genome.
[0212] 12. A method of preparing a vaccine comprising live attenuated SARS-COV-2, said method comprising the steps of: (1) codon deoptimizing a SARS-COV-2 genome to produce a partly codon deoptimized live attenuated SARS-COV-2; and (2) enabling the partly codon deoptimized live attenuated SARS-COV-2 to replicate.
[0213] 13. A method of preparing a vaccine comprising codon deoptimized SARS-COV-2, said method comprising the steps of: optionally, (1) codon deoptimizing a SARS-COV-2 genome to produce a partly codon deoptimized live attenuated SARS-COV-2; (2) enabling the partly codon deoptimized live attenuated SARS-COV-2 to replicate; and (3) preparing a vaccine dose containing the replicated SARS-COV-2 of step (2).
[0214] 14. A method of eliciting an immune response in a subject, said method including the step of administering to the subject the live attenuated SARS-COV-2, SARS-COV-2, SARS-CoV-2 particle or SARS-COV-2 nucleic acid of the first paragraph; the recombinant, isolated or substantially purified nucleic acid of the second paragraph; the vector (or plasmid or genetic construct) of the third paragraph; the cell or isolate of the fourth paragraph; the vaccine of the fifth paragraph; the pharmaceutical preparation of the sixth paragraph; or the immunogenic composition of the seventh paragraph, to thereby elicit an immune response.
[0215] 15. The invention as defined in any one or more of the preceding paragraphs (context permitting), wherein the partly codon deoptimized SARS-COV-2 genome comprises or consists of changes within the ORF1a region of the virus.
[0216] 16. The invention as defined in any one or more of the preceding paragraphs (context permitting), wherein the partly codon deoptimized SARS-COV-2 genome comprises or consists of changes within the ORF1a region of the virus, excluding the 5′ region and/or 3′ region of ORF1a.
[0217] 17. The invention as defined in any one or more of the preceding paragraphs (context permitting), wherein the partly codon deoptimized SARS-COV-2 genome comprises or consists of changes within the ORF1a region of the virus, wherein preferably the changes comprise one or more fragments or sub-regions of ORF1a being codon deoptimized.
[0218] 18. The invention as defined in any one or more of the preceding paragraphs (context permitting), wherein at least one codon for an amino acid with high codon degeneracy is changed to a synonymous codon that is used least frequently, moderately, less rarely, or rarely in the genome of Homo sapiens.
[0219] 19. The invention as defined in any one or more of the preceding paragraphs (context permitting), wherein codon deoptimization results in between about 10 and about 1850 codon changes in ORF1a.
[0220] 20. The invention as defined in any one or more of the preceding paragraphs (context permitting), wherein codon deoptimization results in replacement with one or more rare codons, one or more less rare codons, or one or more moderate codons, one or more CpG dinucleotides/elements, one or more UpA dinucleotides/elements, or any combination of these.
[0221] 21. The invention as defined in any one or more of the preceding paragraphs (context permitting), wherein codon deoptimization results in one or more serine codons being changed, one or more proline codons being changed, one or more threonine codons being changed, one or more isoleucine codons being changed, one or more alanine codons being changed, one or more arginine codons being changed, or any combination of these.
[0222] 22. The invention as defined in any one or more of the preceding paragraphs (context permitting), wherein codon deoptimization results in one or more serine codons being changed to the rare TCG codon.
[0223] 23. The invention as defined in any one or more of the preceding paragraphs (context permitting), wherein codon deoptimization results in one or more proline codons being changed to the less rare CCG codon.
[0224] 24. The invention as defined in any one or more of the preceding paragraphs (context permitting), wherein codon deoptimization results in one or more threonine codons being changed to the less rare ACG codon.
[0225] 25. The invention as defined in any one or more of the preceding paragraphs (context permitting), wherein codon deoptimization results in one or more isoleucine codons being changed to the less rare ATA codon.
[0226] 26. The invention as defined in any one or more of the preceding paragraphs (context permitting), wherein codon deoptimization results in one or more alanine codons being changed to the less rare GCG codon.
[0227] 27. The invention as defined in any one or more of the preceding paragraphs (context permitting), wherein codon deoptimization results in one or more arginine codons being changed to the rare CGT codon.
[0228] 28. The invention as defined in any one or more of the preceding paragraphs (context permitting), wherein the partly codon deoptimized SARS-COV-2 genome comprises the deoptimized codons of the clones/vaccine candidates as shown or as substantially shown in any one of SEQ ID NO:39-68, and as shown or as substantially shown in any one of FIGS. 8 to 12 and 22 to 25.
[0229] 29. The invention as defined in any one or more of the preceding paragraphs (context permitting), wherein the partly codon deoptimized SARS-COV-2 genome comprises at least the deoptimized codons of the clones/vaccine candidates as shown or as substantially shown in any one of SEQ ID NO:39-68, and as shown or as substantially shown in any one of FIGS. 8 to 12 and 22 to 25.
[0230] 30. The invention as defined in any one or more of the preceding paragraphs (context permitting), wherein the partly codon deoptimized SARS-COV-2 genome comprises fewer than the deoptimized codons of the clones/vaccine candidates as shown or as substantially shown in any one of SEQ ID NO:39-68, and as shown or as substantially shown in any one of FIGS. 8 to 12 and 22 to 25.
[0231] 31. The invention as defined in any one or more of the preceding paragraphs (context permitting), wherein the partly codon deoptimized SARS-COV-2 genome comprises anywhere between about 10% and about 100% of the deoptimized codons of the clones/vaccine candidates as shown or as substantially shown in any one of SEQ ID NO:39-68, and as shown or as substantially shown in any one of FIGS. 8 to 12 and 22 to 25.
[0232] 32. The invention as defined in any one or more of the preceding paragraphs (context permitting), wherein the partly codon deoptimized SARS-COV-2 genome comprises one or more codon changes as listed in Table 1b or in Table 11.
[0233] 33. The invention as defined in any one or more of the preceding paragraphs (context permitting), wherein the partly codon deoptimized SARS-COV-2 genome comprises the sequence or substantially the same sequence of clone SARS-COV-2-77-1, SARS-COV-2-77-2, SARS-COV-2-77-3, SARS-COV-2-77-4, SARS-COV-2-77-5, SARS-COV-2-77-6, SARS-COV-2-77-7, SARS-COV-2-160-1, SARS-COV-2-160-2, SARS-COV-2-160-3, SARS-COV-2-160-4, SARS-COV-2-160-5, SARS-COV-2-160-6, SARS-COV-2-160-7, SARS-COV-2-4N-1 or SARS-COV-2-7N-1 or any variant thereof (eg. SARS-COV-2-4N-1-Alpha (B1.1.7), SARS-COV-2-4N-1-Beta (B1.351), SARS-COV-2-4N-1-Gamma (P1), SARS-CoV-2-4N-1-Delta, SARS-COV-2-7N-1-Alpha (B1.1.7), SARS-COV-2-7N-1-Beta (B1.351), SARS-COV-2-7N-1-Gamma (P1), or SARS-COV-2-7N-1-Delta).
[0234] 34. The invention as defined in any one or more of the preceding paragraphs (context permitting), wherein the partly codon deoptimized SARS-COV-2 genome comprises the sequence of clone SARS-COV-2-4N-1 or variant thereof or clone SARS-COV-2-7N-1 or variant thereof, or substantially the same sequence as clone SARS-COV-2-4N-1 or variant thereof or clone SARS-COV-2-7N-1 or variant thereof (eg. SARS-COV-2-4N-1-Alpha (B1.1.7), SARS-COV-2-4N-1-Beta (B1.351), SARS-COV-2-4N-1-Gamma (P1), SARS-COV-2-4N-1-Delta, SARS-COV-2-7N-1-Alpha (B1.1.7), SARS-COV-2-7N-1-Beta (B1.351), SARS-COV-2-7N-1-Gamma (P1), or SARS-COV-2-7N-1-Delta).
[0235] 35. The invention as defined in any one or more of the preceding paragraphs (context permitting), wherein the vaccine, the pharmaceutical preparation, or the immunogenic composition comprises freeze-dried/lyophilized infectious virus that can be reconstituted prior to administration.
[0236] 36. The invention as defined in any one or more of the preceding paragraphs (context permitting), wherein the vaccine is administered by subcutaneous injection or inhalation, intranasally or orally.
[0237] 37. The invention as defined in any one or more of the preceding paragraphs (context permitting), wherein the vaccine, the pharmaceutical preparation, or the immunogenic composition comprises a single clone/vaccine candidate having the sequence shown in any one of SEQ ID NOs:39-68.
[0238] 38. The invention as defined in any one or more of the preceding paragraphs (context permitting), wherein the vaccine, the pharmaceutical preparation, or the immunogenic composition comprises a combination of 2, 3, 4, 5, 6, 7, 8, 9, 10, 11, 12, 13, 14, 15, 16, 17, 18, 19, 20, 21, 22, 23, 24, 25, 26, 27 or 28 clones/vaccine candidates with sequences shown in any one of SEQ ID NOs:39-68.
[0239] 39. The invention as defined in any one or more of the preceding paragraphs (context permitting), wherein the vaccine, the pharmaceutical preparation, or the immunogenic composition comprises one or more of clones SARS-COV-2-77-1. SARS-COV-2-77-2. SARS-COV-2-77-3, SARS-COV-2-77-4, SARS-COV-2-77-5, SARS-COV-2-77-6, SARS-COV-2-77-7, SARS-COV-2-160-1, SARS-COV-2-160-2, SARS-COV-2-160-3, SARS-COV-2-160-4, SARS-COV-2-160-5, SARS-COV-2-160-6, SARS-COV-2-160-7, SARS-COV-2-4N-1 and SARS-COV-2-7N-1 or any variant thereof (eg. SARS-COV-2-4N-1-Alpha (B1.1.7), SARS-COV-2-4N-1-Beta (B1.351), SARS-COV-2-4N-1-Gamma (P1), SARS-COV-2-4N-1-Delta, SARS-COV-2-7N-1-Alpha (B1.1.7), SARS-COV-2-7N-1-Beta (B1.351), SARS-COV-2-7N-1-Gamma (P1), or SARS-COV-2-7N-1-Delta).
[0240] 40. The invention as defined in any one or more of the preceding paragraphs (context permitting), wherein the vaccine, the pharmaceutical preparation, or the immunogenic composition comprises one or more of clones SARS-COV-2-4N-1 and SARS-COV-2-7N-1 or any variant thereof (eg. SARS-COV-2-4N-1-Alpha (B1.1.7), SARS-COV-2-4N-1-Beta (B1.351), SARS-COV-2-4N-1-Gamma (P1), SARS-COV-2-4N-1-Delta, SARS-COV-2-7N-1-Alpha (B1.1.7), SARS-COV-2-7N-1-Beta (B1.351), SARS-COV-2-7N-1-Gamma (P1), or SARS-COV-2-7N-1-Delta).
[0241] 41. The invention as defined in any one or more of the preceding paragraphs (context permitting), wherein a genomic remainder has the sequence of the Wuhan strain or a natural variant thereof, or a genetically modified variant thereof.
[0242] 42. The invention as defined in any one or more of the preceding paragraphs, wherein the genomic remainder has the sequence of any one of Alpha, Pango lineage B.1.1.7; Beta, Pango lineages B.1.351, B.1.351.2, B.1.351.3; Gamma, Pango lincages P.1, P.1.1, P.1.2; Delta, Pango lineages B.1.617.2, AY.1, AY.2; Eta, Pango lineage B.1.525; Iota, Pango lineage B.1.526; Kappa, Pango lineage B.1.617.1; Lambda, Pango lineage C.37; and, Pango lineages B.1.427, B.1.429, P.2, P.3, R.1, R.2, B.1.466.2, B.1.621, AV.1, B.1.1.318, B.1.1.519, AT.1, C.36.3, C.36.3.1, B.1.214.2.
[0243] 43. The invention as defined in any one or more of the preceding paragraphs, wherein the vaccine, the pharmaceutical preparation, or the immunogenic composition comprises one or more of clones SARS-COV-2-4N-1-Alpha (B1.1.7), SARS-COV-2-4N-1-Beta (B1.351), SARS-COV-2-4N-1-Gamma (P1), SARS-COV-2-4N-1-Delta, SARS-COV-2-7N-1-Alpha (B1.1.7), SARS-COV-2-7N-1-Beta (B1.351), SARS-COV-2-7N-1-Gamma (P1), or SARS-COV-2-7N-1-Delta.
[0244] 44. The invention as defined in any one or more of the preceding paragraphs (context permitting), wherein the envelope structural protein (E protein) is codon deoptimized or further codon deoptimized.

[0245] Yet further preferred embodiments of the invention are defined in the following numbered paragraphs:
[0246] 1. A live attenuated severe acute respiratory syndrome coronavirus 2 (SARS-COV-2), SARS-COV-2, SARS-COV-2 particle or SARS-COV-2 nucleic acid comprising a partly codon deoptimized SARS-COV-2 genome.
[0247] 2. A recombinant, isolated or substantially purified nucleic acid comprising a partly codon deoptimized SARS-COV-2 genome or partly codon deoptimized region thereof.
[0248] 3. A vector, plasmid or genetic construct comprising the nucleic acid of paragraph 2.
[0249] 4. A cell or isolate containing the live attenuated SARS-COV-2, SARS-COV-2, SARS-COV-2 particle or SARS-COV-2 nucleic acid of paragraph 1, the nucleic acid of paragraph 2, or the vector, plasmid or genetic construct of paragraph 3.
[0250] 5. A vaccine comprising the live attenuated SARS-COV-2, SARS-COV-2, SARS-CoV-2 particle or SARS-COV-2 nucleic acid of paragraph 1, the recombinant, isolated or substantially purified nucleic acid of paragraph 2, the vector, plasmid or genetic construct of paragraph 3, or the cell or isolate of paragraph 4.
[0251] 6. A pharmaceutical preparation comprising the live attenuated SARS-COV-2, SARS-COV-2, SARS-COV-2 particle or SARS-COV-2 nucleic acid of paragraph 1, the recombinant, isolated or substantially purified nucleic acid of paragraph 2, the vector, plasmid or genetic construct of paragraph 3, or the cell or isolate of paragraph 4.
[0252] 7. An immunogenic composition comprising the live attenuated SARS-COV-2, SARS-COV-2, SARS-COV-2 particle or SARS-COV-2 nucleic acid of paragraph 1, the recombinant, isolated or substantially purified nucleic acid of paragraph 2, the vector, plasmid or genetic construct of paragraph 3, or the cell or isolate of the paragraph 4.
[0253] 8. A method of: (1) vaccinating a subject; (2) prophylactically immunizing a subject against SARS-COV-2 or SARS-COV-2-like virus; (3) preventing a subject from contracting a SARS-COV-2 infection naturally or a SARS-COV-2-like infection naturally; (4) reducing the severity of a natural SARS-COV-2 disease or natural SARS-COV-2-like disease in a subject; (5) treating a subject having a natural SARS-COV-2 infection or natural SARS-CoV-2-like infection; or (6) eliciting an immune response in a subject, said method comprising the step of administering to the subject: the live attenuated SARS-COV-2, SARS-COV-2, SARS-COV-2 particle or SARS-COV-2 nucleic acid of paragraph 1; the recombinant, isolated or substantially purified nucleic acid of paragraph 2; the vector, plasmid or genetic construct of paragraph 3; the cell or isolate of the paragraph 4; the vaccine of paragraph 5; the pharmaceutical preparation of paragraph 6; or the immunogenic composition of paragraph 7.
[0254] 9. Use of: the live attenuated SARS-COV-2, SARS-COV-2, SARS-COV-2 particle or SARS-COV-2 nucleic acid of paragraph 1; the recombinant, isolated or substantially purified nucleic acid of paragraph 2; the vector, plasmid or genetic construct of paragraph 3; the cell or isolate of paragraph 4; the vaccine of paragraph 5; the pharmaceutical preparation of paragraph 6; or the immunogenic composition of paragraph 7, in the preparation of a medicament for: (1) vaccinating a subject; (2) prophylactically immunizing a subject against SARS-COV-2 or SARS-COV-2-like virus; (3) preventing a subject from contracting a SARS-COV-2 infection naturally or a SARS-COV-2-like infection naturally; (4) reducing the severity of a natural SARS-COV-2 disease or natural SARS-COV-2-like disease in a subject; (5) treating a subject having a natural SARS-COV-2 infection or natural SARS-COV-2-like infection; or (6) eliciting an immune response in a subject.
[0255] 10. A live attenuated SARS-COV-2, SARS-COV-2, SARS-COV-2 particle or SARS-COV-2 nucleic acid of paragraph 1; a recombinant, isolated or substantially purified nucleic acid of paragraph 2; a vector, plasmid or genetic construct of paragraph 3; a cell or isolate of paragraph 4; a vaccine of paragraph 5; a pharmaceutical preparation of paragraph 6; or an immunogenic composition of paragraph 7, for use in: (1) vaccinating a subject; (2) prophylactically immunizing a subject against SARS-COV-2 or SARS-COV-2-like virus; (3) preventing a subject from contracting a SARS-COV-2 infection naturally or a SARS-COV-2-like infection naturally; (4) reducing the severity of a natural SARS-COV-2 disease or natural SARS-COV-2-like disease in a subject; (5) treating a subject having a natural SARS-COV-2 infection or natural SARS-COV-2-like infection; or (6) eliciting an immune response in a subject.
[0256] 11. A method of generating a live attenuated SARS-COV-2 vaccine, SARS-COV-2, SARS-COV-2 particle or SARS-COV-2 nucleic acid, or recombinant, isolated or substantially purified nucleic acid comprising a partly codon deoptimized SARS-COV-2 genome or partly codon deoptimized region thereof, comprising the step of partly codon deoptimizing a SARS-COV-2 genome.
[0257] 12. A method of preparing a vaccine comprising live attenuated SARS-COV-2, said method comprising the steps of: (1) codon deoptimizing a SARS-COV-2 genome to produce a partly codon deoptimized live attenuated SARS-COV-2; and (2) enabling the partly codon deoptimized live attenuated SARS-COV-2 to replicate.
[0258] 13. A method of preparing a vaccine comprising codon deoptimized SARS-COV-2, said method comprising the steps of: optionally, (1) codon deoptimizing a SARS-COV-2 genome to produce a partly codon deoptimized live attenuated SARS-COV-2; (2) enabling the partly codon deoptimized live attenuated SARS-COV-2 to replicate; and (3) preparing a vaccine dose containing the replicated SARS-COV-2 of step (2).
[0259] 14. The live attenuated SARS-COV-2, SARS-COV-2, SARS-COV-2 particle or SARS-COV-2 nucleic acid of paragraph 1; the recombinant, isolated or substantially purified nucleic acid of paragraph 2; the vector, plasmid or genetic construct of paragraph 3; the cell or isolate of paragraph 4; the vaccine of paragraph 5; the pharmaceutical preparation of paragraph 6; the immunogenic composition of paragraph 7; the method of paragraph 8; the use of paragraph 9; the live attenuated SARS-COV-2, SARS-COV-2, SARS-COV-2 particle or SARS-CoV-2 nucleic acid, the recombinant, isolated or substantially purified nucleic acid, the vector, plasmid or genetic construct, the cell or isolate, the vaccine, the pharmaceutical preparation or the immunogenic composition for use in paragraph 10; the method of paragraph 11; the method of paragraph 12; or, the method of paragraph 13,
[0260] wherein the partly codon deoptimized SARS-COV-2 genome comprises or consists of codon changes within the ORF1a region of SARS-COV-2.
[0261] 15. The live attenuated SARS-COV-2, SARS-COV-2, SARS-COV-2 particle or SARS-COV-2 nucleic acid of paragraph 14; the recombinant, isolated or substantially purified nucleic acid of paragraph 14; the vector, plasmid or genetic construct of paragraph 14; the cell or isolate of paragraph 14; the vaccine of paragraph 14; the pharmaceutical preparation of paragraph 14; the immunogenic composition of paragraph 14; the use of paragraph 14; the live attenuated SARS-COV-2, SARS-COV-2, SARS-COV-2 particle or SARS-COV-2 nucleic acid, the recombinant, isolated or substantially purified nucleic acid, the vector, plasmid or genetic construct, the cell or isolate, the vaccine, the pharmaceutical preparation or the immunogenic composition for use in paragraph 14; or, the method of paragraph 14,
[0262] wherein the partly codon deoptimized SARS-COV-2 genome comprises or consists of codon changes within the ORF1a region of SARS-COV-2, excluding the 5′ region of ORF1 and/or excluding the 3′ region of ORF1a corresponding to the ribosomal frameshift region; or
[0263] wherein the partly codon deoptimized SARS-COV-2 genome comprises or consists of codon changes within the ORF1a region of SARS-COV-2 corresponding to between about nucleotide position 1534 and about nucleotide position 8586 of the wild-type Wuhan SARS-CoV-2 genome.
[0264] 16. The live attenuated SARS-COV-2, SARS-COV-2, SARS-COV-2 particle or SARS-COV-2 nucleic acid of paragraph 14 or 15; the recombinant, isolated or substantially purified nucleic acid of paragraph 14 or 15; the vector, plasmid or genetic construct of paragraph 14; the cell or isolate of paragraph 14 or 15; the vaccine of paragraph 14 or 15; the pharmaceutical preparation of paragraph 14 or 15; the immunogenic composition of paragraph 14 or 15; the use of paragraph 14 or 15; the live attenuated SARS-COV-2, SARS-COV-2, SARS-COV-2 particle or SARS-COV-2 nucleic acid, the recombinant, isolated or substantially purified nucleic acid, the vector, plasmid or genetic construct, the cell or isolate, the vaccine, the pharmaceutical preparation or the immunogenic composition for use in paragraph 14 or 15; or, the method of paragraph 14 or 15,
[0265] wherein the partly codon deoptimized SARS-COV-2 genome comprises or consists of codon changes within the ORF1a region of SARS-COV-2 corresponding to:
[0266] (1) between about nucleotide position 1534 and about nucleotide position 4254 of the wild-type Wuhan SARS-COV-2 genome;
[0267] (2) between about nucleotide position 4254 and about nucleotide position 6982 of the wild-type Wuhan SARS-COV-2 genome;
[0268] (3) between about nucleotide position 6982 and about nucleotide position 8586 of the wild-type Wuhan SARS-COV-2 genome;
[0269] (4) between about nucleotide position 8586 and about nucleotide position 11165 of the wild-type Wuhan SARS-COV-2 genome;
[0270] (5) between about nucleotide position 11165 and about nucleotide position 12718 of the wild-type Wuhan SARS-COV-2 genome; or
[0271] (6) any combination of (1) to (5).
[0272] 17. The live attenuated SARS-COV-2, SARS-COV-2, SARS-COV-2 particle or SARS-COV-2 nucleic acid of any one of paragraphs 14-16; the recombinant, isolated or substantially purified nucleic acid of any one of paragraphs 14-16; the vector, plasmid or genetic construct of any one of paragraphs 14-16; the cell or isolate of any one of paragraphs 14-16; the vaccine of any one of paragraphs 14-16; the pharmaceutical preparation of any one of paragraphs 14-16; the immunogenic composition of any one of paragraphs 14-16; the use of any one of paragraphs 14-16; the live attenuated SARS-COV-2, SARS-COV-2, SARS-COV-2 particle or SARS-COV-2 nucleic acid, the recombinant, isolated or substantially purified nucleic acid, the vector, plasmid or genetic construct, the cell or isolate, the vaccine, the pharmaceutical preparation or the immunogenic composition for use in any one of paragraphs 14-16; or, the method of any one of paragraphs 14-16,
[0273] wherein the partly codon deoptimized SARS-COV-2 genome comprises or consists of between about 10 and about 1850 codon changes within the ORF1a region; or
[0274] wherein the partly codon deoptimized SARS-COV-2 genome comprises or consists of between about 24 and about 546 codon changes within the ORF1a region.
[0275] 18. The live attenuated SARS-COV-2, SARS-COV-2, SARS-COV-2 particle or SARS-COV-2 nucleic acid of any one of paragraphs 14-17; the recombinant, isolated or substantially purified nucleic acid of any one of paragraphs 14-17; the vector, plasmid or genetic construct of any one of paragraphs 14-17; the cell or isolate of any one of paragraphs 14-17; the vaccine of any one of paragraphs 14-17; the pharmaceutical preparation of any one of paragraphs 14-17; the immunogenic composition of any one of paragraphs 14-17; the use of any one of paragraphs 14-17; the live attenuated SARS-COV-2, SARS-COV-2, SARS-COV-2 particle or SARS-COV-2 nucleic acid, the recombinant, isolated or substantially purified nucleic acid, the vector, plasmid or genetic construct, the cell or isolate, the vaccine, the pharmaceutical preparation or the immunogenic composition for use in any one of paragraphs 14-17; or, the method of any one of paragraphs 14-17,
[0276] wherein the partly codon deoptimized SARS-COV-2 genome comprises or consists of codon changes to synonymous codons that are used less frequently, moderately, less rarely, and/or rarely in the genome of Homo sapiens; or
[0277] wherein the partly codon deoptimized SARS-COV-2 genome comprises or consists of codon changes to one or more rare codons, one or more less rare codons, one or more moderate codons, one or more codons containing CG (CpG) dinucleotides, one or more codons containing UA (UpA) dinucleotides, or any combination thereof.
[0278] 19. The live attenuated SARS-COV-2, SARS-COV-2, SARS-COV-2 particle or SARS-COV-2 nucleic acid of any one of paragraphs 14-18; the recombinant, isolated or substantially purified nucleic acid of any one of paragraphs 14-18; the vector, plasmid or genetic construct of any one of paragraphs 14-18; the cell or isolate of any one of paragraphs 14-18; the vaccine of any one of paragraphs 14-18; the pharmaceutical preparation of any one of paragraphs 14-18; the immunogenic composition of any one of paragraphs 14-18; the use of any one of paragraphs 14-18; the live attenuated SARS-COV-2, SARS-COV-2, SARS-COV-2 particle or SARS-COV-2 nucleic acid, the recombinant, isolated or substantially purified nucleic acid, the vector, plasmid or genetic construct, the cell or isolate, the vaccine, the pharmaceutical preparation or the immunogenic composition for use in any one of paragraphs 14-18; or, the method of any one of paragraphs 14-18,
[0279] wherein the partly codon deoptimized SARS-COV-2 genome comprises or consists of synonymous codon changes whereby one or more Ser codons are changed, one or more Arg codons are changed, one or more Thr codons are changed, one or more Pro codons are changed, one or more Val codons are changed, one or more Leu codons are changed, one or more Ala codons are changed, one or more Ile codons are changed, one or more Cys codons are changed, one or more Gly codons are changed, one or more His codons are changed, one or more Gln codons are changed, one or more Trp codons are changed, one or more Asn codons are changed, one or more Phe codons are changed, one or more Asp codons are changed, one or more Phe codons are changed, one or more Lys codons are changed, one or more Glu codons are changed, or any combination thereof.
[0280] 20. The live attenuated SARS-COV-2, SARS-COV-2, SARS-COV-2 particle or SARS-COV-2 nucleic acid of any one of paragraphs 14-19; the recombinant, isolated or substantially purified nucleic acid of any one of paragraphs 14-19; the vector, plasmid or genetic construct of any one of paragraphs 14-19; the cell or isolate of any one of paragraphs 14-19; the vaccine of any one of paragraphs 14-19; the pharmaceutical preparation of any one of paragraphs 14-19; the immunogenic composition of any one of paragraphs 14-19; the use of any one of paragraphs 14-19; the live attenuated SARS-COV-2, SARS-COV-2, SARS-COV-2 particle or SARS-COV-2 nucleic acid, the recombinant, isolated or substantially purified nucleic acid, the vector, plasmid or genetic construct, the cell or isolate, the vaccine, the pharmaceutical preparation or the immunogenic composition for use in any one of paragraphs 14-19; or, the method of any one of paragraphs 14-19,
[0281] wherein the partly codon deoptimized SARS-COV-2 genome comprises or consists of synonymous codon changes whereby:
[0282] one or more Ser codons are changed to the rare TCG codon;
[0283] one or more proline codons are changed to the less rare CCG codon;
[0284] one or more threonine codons are changed to the less rare ACG codon;
[0285] one or more isoleucine codons are changed to the less rare ATA codon;
[0286] one or more alanine codons are changed to the less rare GCG codon; and/or
[0287] one or more arginine codons are changed to the rare CGT codon or less rare CGA codon.
[0288] 21. The live attenuated SARS-COV-2, SARS-COV-2, SARS-COV-2 particle or SARS-COV-2 nucleic acid of any one of paragraphs 14-20; the recombinant, isolated or substantially purified nucleic acid of any one of paragraphs 14-20; the vector, plasmid or genetic construct of any one of paragraphs 14-20; the cell or isolate of any one of paragraphs 14-20; the vaccine of any one of paragraphs 14-20; the pharmaceutical preparation of any one of paragraphs 14-20; the immunogenic composition of any one of paragraphs 14-20; the use of any one of paragraphs 14-20; the live attenuated SARS-COV-2, SARS-COV-2, SARS-COV-2 particle or SARS-COV-2 nucleic acid, the recombinant, isolated or substantially purified nucleic acid, the vector, plasmid or genetic construct, the cell or isolate, the vaccine, the pharmaceutical preparation or the immunogenic composition for use in any one of paragraphs 14-20; or, the method of any one of paragraphs 14-20,
[0289] wherein the partly codon deoptimized SARS-COV-2 genome comprises or consists of codon changes within the ORF1a region of SARS-COV-2 comprising:
[0290] a deoptimized nucleotide sequence as shown or substantially as shown in any one of SEQ ID NO:33-37;
[0291] a deoptimized nucleotide sequence as shown or substantially as shown in any one of SEQ ID NO:39-68;
[0292] a deoptimized nucleotide sequence as shown or substantially as shown in any one of FIGS. 22 to 25;
[0293] a deoptimized nucleotide sequence as shown in any one of SEQ ID NO:33-37 but with up to 10% fewer or up to 10% (including 1, 2, 3, 4, 5, 6, 7, 8, 9 or 10%) more codon changes than shown;
[0294] a deoptimized nucleotide sequence as shown in any one of SEQ ID NO:39-68 but with up to 10% fewer or up to 10% (including 1, 2, 3, 4, 5, 6, 7, 8, 9 or 10%) more codon changes than shown; or
[0295] a deoptimized nucleotide sequence as shown in any one of FIGS. 22 to 25 but with up to 10% fewer or up to 10% (including 1, 2, 3, 4, 5, 6, 7, 8, 9 or 10%) more codon changes than shown.
[0296] 22. The live attenuated SARS-COV-2, SARS-COV-2, SARS-COV-2 particle or SARS-COV-2 nucleic acid of any one of paragraphs 14-20; the recombinant, isolated or substantially purified nucleic acid of any one of paragraphs 14-20; the vector, plasmid or genetic construct of any one of paragraphs 14-20; the cell or isolate of any one of paragraphs 14-20; the vaccine of any one of paragraphs 14-20; the pharmaceutical preparation of any one of paragraphs 14-20; the immunogenic composition of any one of paragraphs 14-20; the use of any one of paragraphs 14-20; the live attenuated SARS-COV-2, SARS-COV-2, SARS-COV-2 particle or SARS-COV-2 nucleic acid, the recombinant, isolated or substantially purified nucleic acid, the vector, plasmid or genetic construct, the cell or isolate, the vaccine, the pharmaceutical preparation or the immunogenic composition for use in any one of paragraphs 14-20; or, the method of any one of paragraphs 14-20,
[0297] wherein the partly codon deoptimized SARS-COV-2 genome comprises or consists of codon changes as listed in Table 1b, either individually or in combination with each other, or in Table 11, either individually or in combination with each other.
[0298] 23. The live attenuated SARS-COV-2, SARS-COV-2, SARS-COV-2 particle or SARS-COV-2 nucleic acid of any one of paragraphs 14-20; the recombinant, isolated or substantially purified nucleic acid of any one of paragraphs 14-20; the vector, plasmid or genetic construct of any one of paragraphs 14-20; the cell or isolate of any one of paragraphs 14-20; the vaccine of any one of paragraphs 14-20; the pharmaceutical preparation of any one of paragraphs 14-20; the immunogenic composition of any one of paragraphs 14-20; the use of any one of paragraphs 14-20; the live attenuated SARS-COV-2, SARS-COV-2, SARS-COV-2 particle or SARS-COV-2 nucleic acid, the recombinant, isolated or substantially purified nucleic acid, the vector, plasmid or genetic construct, the cell or isolate, the vaccine, the pharmaceutical preparation or the immunogenic composition for use in any one of paragraphs 14-20; or, the method of any one of paragraphs 14-20,
[0299] wherein the partly codon deoptimized SARS-COV-2 genome comprises the nucleotide sequence or substantially the same nucleotide sequence as clone SARS-COV-2-77-1 (or the sequence of SEQ ID NO:39), SARS-COV-2-77-2 (or the sequence of SEQ ID NO:40), SARS-COV-2-77-3 (or the sequence of SEQ ID NO:41), SARS-COV-2-77-4 (or the sequence of SEQ ID NO:42), SARS-COV-2-77-5 (or the sequence of SEQ ID NO:43), SARS-COV-2-77-6 (or the sequence of SEQ ID NO:44), SARS-COV-2-77-7 (or the sequence of SEQ ID NO:45), SARS-COV-2-160-1 (or the sequence of SEQ ID NO:46), SARS-COV-2-160-2 (or the sequence of SEQ ID NO:47), SARS-COV-2-160-3 (or the sequence of SEQ ID NO:48), SARS-COV-2-160-4 (or the sequence of SEQ ID NO:49), SARS-COV-2-160-5 (or the sequence of SEQ ID NO:50), SARS-COV-2-160-6 (or the sequence of SEQ ID NO:51), SARS-COV-2-160-7 (or the sequence of SEQ ID NO:52), SARS-COV-2-4N-1 (or the sequence of SEQ ID NO:53) or SARS-COV-2-7N-1 (or the sequence of SEQ ID NO:60), or any variant thereof (eg. SARS-COV-2-4N-1-Alpha (B1.1.7), SARS-COV-2-4N-1-Beta (B1.351), SARS-CoV-2-4N-1-Gamma (P1), SARS-COV-2-4N-1-Delta, SARS-COV-2-7N-1-Alpha (B1.1.7), SARS-COV-2-7N-1-Beta (B1.351), SARS-COV-2-7N-1-Gamma (P1), or SARS-COV-2-7N-1-Delta).
[0300] 24. The live attenuated SARS-COV-2, SARS-COV-2, SARS-COV-2 particle or SARS-COV-2 nucleic acid of any one of paragraphs 14-20; the recombinant, isolated or substantially purified nucleic acid of any one of paragraphs 14-20; the vector, plasmid or genetic construct of any one of paragraphs 14-20; the cell or isolate of any one of paragraphs 14-20; the vaccine of any one of paragraphs 14-20; the pharmaceutical preparation of any one of paragraphs 14-20; the immunogenic composition of any one of paragraphs 14-20; the use of any one of paragraphs 14-20; the live attenuated SARS-COV-2, SARS-COV-2, SARS-COV-2 particle or SARS-COV-2 nucleic acid, the recombinant, isolated or substantially purified nucleic acid, the vector, plasmid or genetic construct, the cell or isolate, the vaccine, the pharmaceutical preparation or the immunogenic composition for use in any one of paragraphs 14-20; or, the method of any one of paragraphs 14-20,
[0301] wherein the partly codon deoptimized SARS-COV-2 genome comprises the nucleotide sequence of clone SARS-COV-2-7N-1, or substantially the same nucleotide sequence as clone SARS-COV-2-7N-1, or any variant thereof (eg. SARS-COV-2-7N-1-Alpha (B1.1.7), SARS-COV-2-7N-1-Beta (B1.351), SARS-COV-2-7N-1-Gamma (P1), or SARS-CoV-2-7N-1-Delta).
[0302] 25. A vaccine comprising live attenuated SARS-COV-2, SARS-COV-2, SARS-CoV-2 particle or SARS-COV-2 nucleic acid comprising a partly codon deoptimized SARS-CoV-2 genome, wherein the partly codon deoptimized SARS-COV-2 genome comprises the nucleotide sequence of clone SARS-COV-2-7N-1 or the sequence of SEQ ID NO:60, or substantially the same nucleotide sequence as clone SARS-COV-2-7N-1 or the sequence of SEQ ID NO:60, or any variant thereof (eg. SARS-COV-2-7N-1-Alpha (B1.1.7), SARS-COV-2-7N-1-Beta (B1.351), SARS-COV-2-7N-1-Gamma (P1), or SARS-COV-2-7N-1-Delta).
[0303] 26. The live attenuated SARS-COV-2, SARS-COV-2, SARS-COV-2 particle or SARS-COV-2 nucleic acid of any one of paragraphs 14-20; the recombinant, isolated or substantially purified nucleic acid of any one of paragraphs 14-20; the vector, plasmid or genetic construct of any one of paragraphs 14-20; the cell or isolate of any one of paragraphs 14-20; the vaccine of any one of paragraphs 14-20; the pharmaceutical preparation of any one of paragraphs 14-20; the immunogenic composition of any one of paragraphs 14-20; the use of any one of paragraphs 14-20; the live attenuated SARS-COV-2, SARS-COV-2, SARS-COV-2 particle or SARS-COV-2 nucleic acid, the recombinant, isolated or substantially purified nucleic acid, the vector, plasmid or genetic construct, the cell or isolate, the vaccine, the pharmaceutical preparation or the immunogenic composition for use in any one of paragraphs 14-20; or, the method of any one of paragraphs 14-20,
[0304] wherein a genomic remainder has the sequence of the Wuhan strain or a natural variant thereof, or a genetically modified variant thereof, such as the sequence of any one of Alpha, Pango lineage B.1.1.7; Beta, Pango lineages B.1.351, B.1.351.2, B.1.351.3; Gamma, Pango lineages P.1, P.1.1, P.1.2; Delta, Pango lineages B.1.617.2, AY.1, AY.2; Eta, Pango lineage B.1.525; Iota, Pango lineage B.1.526; Kappa, Pango lineage B.1.617.1; Lambda, Pango lineage C.37; and, Pango lincages B.1.427, B.1.429, P.2, P.3, R.1, R.2, B.1.466.2, B.1.621, AV.1, B.1.1.318, B.1.1.519, AT.1, C.36.3, C.36.3.1, B.1.214.2, or
[0305] wherein the vaccine, the pharmaceutical preparation, or the immunogenic composition comprises one or more of clones SARS-COV-2-4N-1-Alpha (B1.1.7), SARS-CoV-2-4N-1-Beta (B1.351), SARS-COV-2-4N-1-Gamma (P1), SARS-COV-2-4N-1-Delta, SARS-COV-2-7N-1-Alpha (B1.1.7), SARS-COV-2-7N-1-Beta (B1.351), SARS-COV-2-7N-1-Gamma (P1), or SARS-COV-2-7N-1-Delta.

[0306] Any of the features described herein can be combined in any combination with any one or more of the other features described herein within the scope of the invention.

### EXAMPLES

### Example 1—Construction of First-Generation Codon-Deoptimized SARS-COV-2 Vaccines

[0307] The experimental steps described in Examples 1-5 are summarised in the flowchart of FIG. 7.

[0308] We are using codon deoptimization technology to make multiple mutations in the non-structural proteins (ORF1a region, N-terminal part of replicase) of SARS-COV-2, representing the virus isolate from Wuhan. See FIG. 1.

[0309] The ORF1a region was chosen because its deoptimization automatically results in the reduction of ORF1b expression as well while at the same time there is no change in the ratio of ORF1a/ORF1b products.

[0310] Regions required for known RNA based replication and expression (e.g. packaging, frame shift) are protected or excluded from deoptimization as this may hamper vital functions of the virus. Proteins expressed via subgenomic RNAs were considered as bad targets for deoptimization due to possible misfolding of protein (e.g. Spike-protein) and possibility of compensation of translation defect by increase of corresponding subgenomic RNA synthesis. The packaging signal of coronaviruses is outside ORF1a (in the 3′ of ORF1b), so it is not affected by this approach. The region encoding major antigens and structural protein has a complex expression pattern, which is a characteristic of the order Nidovirales. Codon deoptimization in this region is a possibility, but is not the first option as this region may not tolerate such modifications.

[0311] We are using a compact strategy (deoptimized codons in regions close to each other and not scattered over a large region) as this is technically the most straightforward approach.

[0312] We have designed clones/vaccine candidates to allow for substitution of the Spike-protein region, which is the main viral antigen. For design of deoptimized fragments, we know from our previous experience with Zika virus (Mutso M, Saul S, Rausalu K, et al. Reverse genetic system, genetically stable reporter viruses and packaged subgenomic replicon based on a Brazilian Zika virus isolate. J Gen Virol. 2017; 98(11):2712-2724. doi: 10.1099/jgv.0.000938) that deoptimization of 35% of the viral genome resulted in severely attenuated virus. Based on this experience, for SARS-COV-2 the deoptimized region should be approximately 12 kbp. We have prepared clones/vaccine candidates with deoptimized regions of about 2, 4, 6, 8 and 12 kb regions in length.

[0313] In contrast to an optimization process, which can be done using free software or online tools, there is no publicly available program for CD. Therefore, it was done manually. Every codon in ORF1a was analyzed in terms of its usage frequency in Homo sapiens. If the codon was frequent it was manually changed to a synonymous but the less used one. For instance, amino acid Leucine (Leu) can be encoded by six different codons with the following frequencies: UUA—15%, UUG—12%, CUU—12%, CUC—10%, CUA—5%, and CUG —46%. If the Leu codon in the original sequence was represented by highly abundant CUG (46%), it was changed to rare CUA (5%). Some codons were left unchanged: Methionine (Met) and Tryptophan (Trp) as both of them are encoded by only one codon; and, Asparagine (Asn) and Aspartic acid (Asn) as their codons are used at almost the same frequency.

[0314] The positions of nucleotides changed due to the deoptimization of ORF1a are seen in SEQ ID NOS: 1-31 as well as in the FIGS. 8-12.

### Example 2—Generation of First Generation SARS-COV-2 Constructs

[0315] See FIGS. 1-4, FIG. 3 in particular. The cDNA encoding the virus genome was split into 5 fragments: 1 (shown as 1L and 1R), 2, 3, 4 and 5. The fragments were obtained from GenScript, and are flanked by unique restriction sites: SanD1 (position 1524), PacI (position 8586), Mlu1 (position 13956), Bsu36I (position 18176) and BamHI (position 25313) which allowed ordered assembly of a full construct using the two methods described below in Example 3.

[0316] The ORF1a region was selected for codon deoptimization, but excluding the 5′ and 3′ regions (ribosomal frameshift region). Fragment 2 and the 5′ region of fragment 3 were codon deoptimized. See FIG. 3. Combined, the length of the deoptimized region is 11,186 bp/nucleotides long.

[0317] As it is not known how much deoptimization the virus can tolerate and how much is necessary for attenuation, the ORF1a region was split into 5 sub-fragments. Deoptimized and wild-type/non-deoptimized sub-fragments alike can be directionally joined/assembled in different combinations using enzymes SmaII (position 4254), AvrII (position 6982), PacI (position 8586), SphI (position 11165) and PshAI (position 12718) cleavage sites. See FIGS. 3 and 4. From five wildtype (‘W’) and five deoptimized (‘D’) sub-fragments, one can generate 31 different combinations (in addition to wild-type) from sub-fragments 2A, 2B, 2C, 3A and 3B. The 31 recombinant clones/vaccine candidates that were generated are described below. ‘D’ denotes deoptimized, and ‘W’ denotes wildtype and therefore not deoptimized.
[0318] Clone pCCI-4K-SARS-COV-2-DDDDD. All five sub-fragments (2A, 2B, 2C, 3A, 3B) were deoptimized.
[0319] Clone pCCI-4K-SARS-COV-2-DDDDW. The first four sub-fragments (2A, 2B, 2C, 3A) were deoptimized.
[0320] Clone pCCI-4K-SARS-COV-2-DDDWD. Sub-fragments one, two, three, and five (2A, 2B, 2C. 3B) were deoptimized.
[0321] Clone pCCI-4K-SARS-COV-2-DDDWW. The first three sub-fragments (2A, 2B, 2C) were deoptimized.
[0322] Clone pCCI-4K-SARS-COV-2-DDWDD. Sub-fragments one, two, four, and five (2A, 2B, 3A, 3B) were deoptimized.
[0323] Clone pCCI-4K-SARS-COV-2-DDWDW. Sub-fragments one, two, and four (2A, 2B, 3A) were deoptimized.
[0324] Clone pCCI-4K-SARS-COV-2-DDWWD, Sub-fragments one, two, and five (2A, 2B, 3B) were deoptimized.
[0325] Clone pCCI-4K-SARS-COV-2-DDWWW. The first two sub-fragments (2A, 2B) were deoptimized.
[0326] Clone pCCI-4K-SARS-COV-2-DWDDD. The first, third, fourth, and fifth sub-fragments (2A, 2C, 3A, 3B) were deoptimized.
[0327] Clone pCCI-4K-SARS-COV-2-DWDDW. The first, third, and fourth sub-fragments (2A, 2C, 3A) were deoptimized.
[0328] Clone pCCI-4K-SARS-COV-2-DWDWD. The first, third, and fifth sub-fragments (2A, 2C, 3B) were deoptimized.
[0329] Clone pCCI-4K-SARS-COV-2-DWDWW. The first and third sub-fragments (2A, 2C) were deoptimized.
[0330] Clone pCCI-4K-SARS-COV-2-DWWDD. The first, fourth, and fifth sub-fragments (2A, 3A, 3B) were deoptimized.
[0331] Clone pCCI-4K-SARS-COV-2-DWWDW. The first and fourth sub-fragments (2A, 3A) were deoptimized.
[0332] Clone pCCI-4K-SARS-COV-2-DWWWD. The first and fifth sub-fragments (2A, 3B) were deoptimized.
[0333] Clone pCCI-4K-SARS-COV-2-DWWWW. The first sub-fragment (2A) was deoptimized.
[0334] Clone pCCI-4K-SARS-COV-2-WDDDW. The second, third, and fourth sub-fragments (2B, 2C, 3A) were deoptimized.
[0335] Clone pCCI-4K-SARS-COV-2-WDDWD. The second, third, and fifth sub-fragments (2B, 2C, 3B) were deoptimized.
[0336] Clone pCCI-4K-SARS-COV-2-WDDWW. The second and third sub-fragments (2B, 2C) were deoptimized.
[0337] Clone pCCI-4K-SARS-COV-2-WDWDD. The second, fourth, and fifth sub-fragments (2B, 3A, 3B) were deoptimized.
[0338] Clone pCCI-4K-SARS-COV-2-WDWDW. The second and fourth sub-fragments (2B, 3A) were deoptimized.
[0339] Clone pCCI-4K-SARS-COV-2-WDWWD. The second and fifth sub-fragments (2B, 3B) were deoptimized.
[0340] Clone pCCI-4K-SARS-COV-2-WDWWW. The second sub-fragment (2B) was deoptimized.
[0341] Clone pCCI-4K-SARS-COV-2-WWDDD. The last three sub-fragments (2C, 3A, 3B) were deoptimized.
[0342] Clone pCCI-4K-SARS-COV-2-WWDDW. The third and fourth sub-fragments (2C, 3A) were deoptimized.
[0343] Clone pCCI-4K-SARS-COV-2-WWDWD. The third and fifth sub-fragments (2C, 3B) were deoptimized.
[0344] Clone pCCI-4K-SARS-COV-2-WWDWW. The third sub-fragment (2C) was deoptimized.
[0345] Clone pCCI-4K-SARS-COV-2-WWWDD. The last two sub-fragments (3A, 3B) were deoptimized.
[0346] Clone pCCI-4K-SARS-COV-2-WWWDW. The fourth sub-fragment (3A) was deoptimized.
[0347] Clone pCCI-4K-SARS-COV-2-WWWWD. The last sub-fragment (3B) was deoptimized.
[0348] Clone pCCI-4K-SARS-COV-2-WDDDD. The last four sub-fragments (2B, 2C, 3A, 3B) were deoptimized.
[0349] Clone pCCI-4K-SARS-COV-2. No sub-fragment was deoptimized.

### Example 3—Transfection Strategy for Obtaining Infectious First Generation Virus or Vaccine Candidates

[0350] See FIG. 2. Five fragments of the SARS-COV-2 genome (containing the 5 sub-fragments of ORF1a) were either (1) ligated within a bacterial artificial chromosome (BAC) vector pCC1-4K to form a genetic construct and expressed to obtain infectious virus or vaccine candidates, or (2) five fragments of the SARS-COV-2 genome (containing the 5 sub-fragments) were ligated together without cloning and expressed to obtain infectious virus or vaccine candidates. For (1), cytomegalovirus (CMV) promoter was placed at the 5′ end of SARS-COV-2 clone and hepatitis delta virus ribozyme (HDV Rz) and simian virus 40 terminator (SV40 p(A)) were placed at the 3′ end. These elements are needed for transcription in transfected cells and to rescue infectious virus and vaccine candidates from cDNA plasmid.

[0351] That is, we are using two ways to generate infectious virus or vaccine candidates: i) assemble all 5 sub-fragments into a single clone/genetic construct/vector (containing all fragments of the SARS-COV-2 genome) and use it for transfection (this is the preferred option); or, ii) ligate all 5 sub-fragments into a single clone (containing all fragments of the SARS-CoV-2 genome) and use the ligated product for transfection without cloning (this is the backup option). For option i) a full-length infectious clone of SARS-COV-2 was assembled in a bacterial artificial chromosome as previously described for SARS-COV-1 (Enjuanes L, Zuñiga S, Castaño-Rodriguez C, Gutierrez-Alvarez J, Canton J, Sola I. Molecular Basis of Coronavirus Virulence and Vaccine Development. Adv Virus Res. 2016; 96:245-286. doi: 10.1016/bs.aivir.2016.08.003) and for Zika virus (Mutso M. Saul S, Rausalu K. et al. Reverse genetic system, genetically stable reporter viruses and packaged subgenomic replicon based on a Brazilian Zika virus isolate. J Gen Virol. 2017; 98(11):2712-2724. doi: 10.1099/jgv.0.000938). For option ii) a split system as described by Scobey and colleagues (Scobey T, Yount B L, Sims A C, et al. Reverse genetics with a full-length infectious cDNA of the Middle East respiratory syndrome coronavirus. Proc Natl Acad Sci USA. 2013; 110(40): 16157-16162. doi: 10.1073/pnas. 1311542110) was used.

[0352] Minimising the passaging (viral production in cells) of mutant virus will reduce the chances of reversions. Genetic stability testing can be carried out, for example, by testing the phenotype of the mutant virus after 10 rounds of passage in vitro. Sequencing also will demonstrate the base changes in the virus genome over this time. We have inserted multiple mutations into the vaccine candidate, which means that the chance of complete reversion is negligible.

### Example 4—Test results

[0353] The deoptimized SARS-COV-2 infectious first generation vaccine candidate clones of the earlier Example were respectively transfected into BHK21 cells using lipofectamine LTX according to manufacturer's instructions. The BHK21 cells were cultured overnight at 37° C. with 5% CO₂ for 1 hour and then transferred to Vero E6 cells. However, no viruses could be rescued from any of the deoptimized infectious clones, suggesting the infectious clones were over deoptimized. For this reason, further vaccine CD candidates were constructed.

### Example 5—Further Construction of Second Generation SARS-COV-2 Vaccine Candidates Using Codon-Deoptimized Technology

[0354] The experimental results of Example 4 showed that the virus cannot tolerate a certain degree or type of deoptimization. In view of the failure of these first generation candidates, further second generation clones/vaccine candidates were constructed and tested using four different CD strategies. See FIGS. 13-16. The positions of nucleotides changed due to the deoptimization of ORF1a are seen in SEQ ID NOS:39-68 as well as in FIGS. 22 to 25.

[0355] The experimental steps described in the following Examples are summarised in the flowchart of FIG. 16.

### Example 6—Generation of Second Generation SARS-COV-2 Constructs

[0356] See FIGS. 13 to 15. The cDNA encoding the virus genome was split into 3 fragments: 1, 2 and 3. The fragments were obtained from GenScript, and are flanked by unique restriction sites: SanDI (position 1534), SmaI (position 4254), AvrII (position 6982) and PacI (position 8586) which allowed ordered assembly of a full construct using the two methods described below.

[0357] The ORF1a region was selected for codon deoptimization, but excluding the 5′ and 3′ regions (ribosomal frameshift region).

[0358] Deoptimized and wild-type/non-deoptimized fragments alike can be directionally joined/assembled in different combinations using enzymes SmaI (position 4254) and AvrII (position 6982) cleavage sites. See FIGS. 14 and 15. From three wildtype (‘W’) and three deoptimized (‘D’) fragments, one can generate 7 different combinations (in addition to wild-type).

### Strategy 1—Generation of Construct SARS-COV-2-77

[0359] This deoptimization strategy was used to bring in the rarest codon in Homo species, and increase the CpG element that was shown to be an important immunoregulator for RNA virus immune response.

[0360] About half of the serine amino acids present in the deoptimization region were targeted to replace with the rare serine codon TCG. 77 (of 160) codons of serine were selected to be deoptimized to TCG. TCG codons have a CpG element that is known to be an important immunoregulator for RNA virus immune response. Thus, the deoptimization of serine to TCG also increased the frequency of the CpG element in the fragment.

[0361] This resulted in the generation of 7 recombinant clones/vaccine candidates:
[0362] Clone SARS-COV-2-77-1 (‘77-1’): Variation 1: deoptimization between AvrII to PacI.
[0363] Clone SARS-COV-2-77-2 (‘77-2’): Variation 2: deoptimization between SmaI to AvrII.
[0364] Clone SARS-COV-2-77-3 (‘77-3’): Variation 3: deoptimization between SanDI to SmaI.
[0365] Clone SARS-COV-2-77-4 (‘77-4’): Variation 4: deoptimization between SanDI to AvrII.
[0366] Clone SARS-COV-2-77-5 (‘77-5’): Variation 5: deoptimization between SanDI to SmaI and AvrII to PacI.
[0367] Clone SARS-COV-2-77-6 (‘77-6’): Variation 6: deoptimization between SmaI to PacI.
[0368] Clone SARS-COV-2-77-7 (‘77-7’): Variation 7: deoptimization between SanDI to PacI.
[0369] Tentatively the best vaccine candidate using this strategy is SARS-COV-2-77-7 (‘77-7’) (SEQ ID NO:45). Fragments 1, 2 and 3 of SARS-COV-2-77-7 have been deoptimized.

### Strategy 2—Generation of Construct SARS-COV-2-160

[0370] This deoptimization strategy was used to bring in the rarest codon in Homo species, and increase the CpG element that was shown to be an important immunoregulator for RNA virus immune response.

[0371] All of the serine amino acids present in the deoptimization region were targeted to replace with the rare codon TCG. 160 codons of serine were selected to be deoptimized to TCG.

[0372] This resulted in the generation of 7 recombinant clones/vaccine candidates:
[0373] SARS-COV-2-160-1 (‘160-1’): Variation 1: deoptimization between AvrII to PacI.
[0374] SARS-COV-2-160-2 (‘160-2’): Variation 2: deoptimization between SmaI to AvrII.
[0375] SARS-COV-2-160-3 (‘160-3’): Variation 3: deoptimization between SanDI to SmaI.
[0376] SARS-COV-2-160-4 (‘160-4’): Variation 4: deoptimization between SanDI to AvrII.
[0377] SARS-COV-2-160-5 (‘160-5’): Variation 5: deoptimization between SanDI to SmaI and AvrII to PacI.
[0378] SARS-COV-2-160-6 (‘160-6’): Variation 6: deoptimization between SmaI to PacI.
[0379] SARS-COV-2-160-7 (‘160-7’): Variation 7: deoptimization between SanDI to PacI.
[0380] Tentatively the best vaccine candidate using this strategy is SARS-COV-2-160-7 (‘160-7’) (SEQ ID NO:52). SARS-COV-2-160-7 has CD in fragments 1, 2 and 3.

### Strategy 3—Generation of Construct SARS-COV-2-4N

[0381] This deoptimization strategy was used to bring in the less rare codons in Homo species, and increase the CpG element that was shown to be important immunoregulators for RNA virus immune response.

[0382] The amino acids isoleucine, proline, threonine and alanine present in the deoptimization region were targeted to replace with less rare codons. 81 codons for proline were selected to be deoptimized to CCG. 186 codons for threonine were selected to be deoptimized to ACG. 82 codons for isoleucine were selected to be deoptimized to ATA. 147 codons for alanine were selected to be deoptimized to GCG.

[0383] If all 3 fragments were deoptimized there would be a total of 496 codon changes. This resulted in the generation of 7 recombinant clones/vaccine candidates:
[0384] SARS-COV-2-4N-1 (‘4N-1’): Variation 1: deoptimization between AvrII to PacI.
[0385] SARS-COV-2-4N-2 (‘4N-2’): Variation 2: deoptimization between SmaI to AvrII.
[0386] SARS-COV-2-4N-3 (‘4N-3’): Variation 3: deoptimization between SanDI to SmaI.
[0387] SARS-COV-2-4N-4 (‘4N-4’): Variation 4: deoptimization between SanDI to AvrII.
[0388] SARS-COV-2-4N-5 (‘4N-5’): Variation 5: deoptimization between SanDI to SmaI and AvrII to PacI.
[0389] SARS-COV-2-4N-6 (‘4N-6’): Variation 6: deoptimization between SmaI to PacI.
[0390] SARS-COV-2-4N-7 (‘4N-7’): Variation 7: deoptimization between SanDI to PacI.

[0391] However, only one candidate could be rescued using this strategy, being SARS-CoV-2-4N-1 (‘4N-1’) (SEQ ID NO:53) The remaining 6 were dead clones. Only fragment 3 of SARS-COV-2-4N-1 has been deoptimized, there were 97 codon changes.

### Strategy 4—Generation of Construct SARS-COV-2-7N

[0392] This deoptimization strategy was used to selectively bring in less rare codons in Homo species, and increase the CpG element that was shown to be an important immunoregulator for RNA virus immune response.

[0393] The amino acids isoleucine, proline, threonine, alanine, arginine, glycine and glutamine present in the deoptimization region were targeted to replace with moderate codons. 82 codons for proline were selected to be deoptimized to CCG. 178 codons for threonine were selected to be deoptimized to ACG. 44 codons for isoleucine were selected to be deoptimized to ATA. 147 codons for alanine were selected to be deoptimized to GCG. 40 codons of arginine were selected to be deoptimized to CGT. 41 codons of glycine were selected to be deoptimized to GGT. 14 codons of glutamine were selected to be deoptimized to CAA.

[0394] If all 3 fragments were deoptimized there would be a total of 546 codon changes. This resulted in the generation of 7 recombinant clones/vaccine candidates:
[0395] SARS-COV-2-7N-1 (‘7N-1’): Variation 1: deoptimization between AvrII to PacI.
[0396] SARS-COV-2-7N-2 (‘7N-2’): Variation 2: deoptimization between SmaI to AvrII.
[0397] SARS-COV-2-7N-3 (‘7N-3’): Variation 3: deoptimization between SanDI to SmaI.
[0398] SARS-COV-2-7N-4 (‘7N-4’): Variation 4: deoptimization between SanDI to AvrII.
[0399] SARS-COV-2-7N-5 (‘7N-5’): Variation 5: deoptimization between SanDI to SmaI and AvrII to PacI.
[0400] SARS-COV-2-7N-6 (‘7N-6’): Variation 6: deoptimization between SmaI to PacI.
[0401] SARS-COV-2-7N-7 (‘7N-7’): Variation 7: deoptimization between SanDI to PacI.

[0402] However, only one candidate could be rescued using this strategy, being SARS-CoV-2-7N-1 (‘7N-1’) (SEQ ID NO:60). The remaining 6 were dead clones. Only fragment 3 of SARS-COV-2-7N-1 has been deoptimized; there being 97 codon changes.

### Summary of CD Ranges:

[0403] SARS-COV-2-77 group: minimum codon replacement: SARS-COV-2-77-3 (deoptimization in fragment 1) has 24 Ser codon replacements; maximum codon replacement: SARS-COV-2-77-7 (deoptimization in fragment 1+2+3) has 77 Ser codon replacements.
[0404] SARS-COV-2-160 group: minimum codon replacement: SARS-COV-2-160-3 (deoptimization in fragment 1) has 48 Ser codon replacements; maximum codon replacement: SARS-COV-2-160-7 (deoptimization in fragment 1+2+3) has 160 Ser codon replacements.
[0405] SARS-COV-2-4N group: minimum codon replacement: SARS-COV-2-4N-1 (deoptimization in fragment 3) has 97 codon replacements; maximum codon replacement: SARS-COV-2-4N-7 (deoptimization in fragment 1+2+3) has 496 codon replacements.
[0406] SARS-COV-2-7N group: minimum codon replacement: SARS-COV-2-7N-1 (deoptimization in fragment 3) has 97 codon replacements; maximum codon replacement: SARS-COV-2-7N-7 (deoptimization in fragment 1+2+3) has 546 codon replacements.

[0407] The clones were prepared as generally depicted in FIGS. 13 to 15. Three fragments of the SARS-COV-2 genome were ligated within a bacterial artificial chromosome (BAC) vector pCC1-4K to create a genetic construct and expressed to obtain infectious virus or vaccine candidates. A cytomegalovirus (CMV) promoter was placed at the 5′ end of SARS-CoV-2 clone and hepatitis delta virus ribozyme (HDV Rz) and simian virus 40 terminator (SV40 p(A)) were placed at the 3′ end. These elements are needed for transcription in transfected cells and to rescue infectious virus and vaccine candidates from cDNA plasmid.

[0408] The full-length infectious clone of SARS-COV-2 was assembled in a bacterial artificial chromosome as previously described for SARS-COV-1 (Enjuanes L, Zuñiga S. Castaño-Rodriguez C, Gutierrez-Alvarez J, Canton J, Sola I. Molecular Basis of Coronavirus Virulence and Vaccine Development. Adv Virus Res. 2016; 96:245-286. doi: 10.1016/bs.aivir.2016.08.003) and for Zika virus (Mutso M, Saul S, Rausalu K, et al. Reverse genetic system, genetically stable reporter viruses and packaged subgenomic replicon based on a Brazilian Zika virus isolate. J Gen Virol. 2017; 98(11):2712-2724. doi: 10.1099/jgv.0.000938). Alternatively, a split system as described by Scobey and colleagues (Scobey T. Yount B L, Sims A C, et al. Reverse genetics with a full-length infectious cDNA of the Middle East respiratory syndrome coronavirus. Proc Natl Acad Sci USA. 2013; 110(40): 16157-16162. doi: 10.1073/pnas.1311542110) was used.

### Example 7—Transformation and Purification of Second Generation SARS-COV-2 Infectious Clones

[0409] This Example describes the transformation and purification of SARS-COV-2 infectious clones from EPI300 bacterial cells (TransforMax™ EPI300™ E. coli).

### Part I: SARS-COV-2 Plasmid Transformation

[0410] Prepare 250 μl of SOC medium without antibiotic for each transformation to be performed. Maintain the medium at room temperature. Pre-chill 1.5 ml tubes on ice/at 4° C. and heat a water bath to 42° C. Thaw TransforMax EPI300 Chemically Competent E. coli cells on ice. Mix by gentle tapping. Use the cells immediately. Transfer 1-5 μl of DNA and 50 μl of cells to a pre-chilled 1.5 ml tube and incubate on ice for 30 minutes. Transfer the tubes to the water bath at 42° C. and heat shock for 30 seconds. Transfer the cells back to ice and cool for 2 minutes. Add 250 μl of SOC medium to each tube. Allow cells to recover by incubating at 37° C. for 60 minutes in a shaking incubator at 220-230 rpm. Plate the cells on LB agar plate with 12.5 μg/ml chloramphenicol and culture overnight at 37° C. Pick single E. coli colony from the plate and culture in LB medium with 12.5 μg/ml chloramphenicol overnight at 37° C. in a shaking incubator at 220-230 rpm. Preserve the transformed E. coli culture by mixing with sterile glycerol to obtain a final concentration of 20% glycerol. Store glycerol stocks at −80° C.

### Part II: Purification of SARS-COV-2 Infectious Clone

[0411] Inoculate 0.5 ml of E. coli stock in 250 ml SOY medium and culture overnight at 37° C. in a shaking incubator at 220-230 rpm. Add 750 ml of fresh SOY medium with 12.5 μg/ml chloramphenicol and 1 ml of the Copy Control Induction Solution. Incubate the culture at 37° C. in a shaking incubator with vigorous shaking for 5 hours. Collect cells by centrifugation at 2000 g for 10 min at 4° C. Resuspend the cells in 100 ml Resuspension Buffer RES-EF. Add 100 ml Lysis Buffer LYS-EF, mix carefully by inverting the tube for 4-5 times, incubate for 5 min at room temperature. Add 100 ml Neutralization Buffer NEU-EF, mix thoroughly by inverting the tube for 4-5 times. Centrifuge at 5000 g for 5 min at 4° C. to pellet cell debris. Filter the supernatant through 70 μm mesh cell strainer. Add 300 ml isopropanol to the filtered supernatant and mix well. Centrifuge at 6000 g for 15 min at 4° C. Discard the supernatant. Treat the white pellet as bacterial pellet and follow purification method according the instructions of NucleoBond Xtra Midi EF, Midi kit for endotoxin-free plasmid DNA.

[0412] Twenty-eight recombinant clones/vaccine candidates were constructed (SEQ ID NOs:39-66) and 16 recombinant clones/vaccine candidates were rescued. These were: SARS-COV-2-77-1. SARS-COV-2-77-2, SARS-COV-2-77-3, SARS-COV-2-77-4, SARS-COV-2-77-5, SARS-COV-2-77-6, SARS-COV-2-77-7 (‘Vaccine 77-7’), SARS-COV-2-160-1, SARS-COV-2-160-2, SARS-COV-2-160-3. SARS-COV-2-160-4 (‘Vaccine 160-4’), SARS-COV-2-160-5, SARS-COV-2-160-6, SARS-COV-2-160-7 (‘Vaccine 160-7’), SARS-COV-2-4N-1 (‘Vaccine 4N-1’) and SARS-COV-2-7N-1 (‘Vaccine 7N-1’).

### Example 8—Generation of Severe Acute Respiratory Syndrome Coronavirus 2 (SARS-COV-2) from Full Length DNA Infectious Second Generation Clones

[0413] The Example describes the generation of passage 0 (zero) SARS-COV-2 stocks from a full-length DNA infectious clone as described in Example 7.

### Day 1—Plating Cells

[0414] Seed BHK cells in a T25 flask(s) at ˜1.5-2×10⁶ cells in DMEM growth medium (DMEM+5% FCS) and incubate overnight at 37° C. with 5% CO₂.

### Day 2—Transfection

[0415] Measure the concentration of the DNA infectious clone plasmid on a Nanodrop spectrophotometer instrument. Approximately 10 μg of DNA is sufficient to perform the transfection. Set up tubes with 5-10 ml of F10SC disinfectant for liquid waste and pipette tip decontamination. In a sterile 1.5 ml tube dilute 20 μl Lipofectamine LTX Reagent in 500 μl Opti-MEM medium. In a separate sterile 1.5 ml tube dilute 10 μl PLUS Reagent in 500 μl Opti-MEM medium. Add 10 μg DNA into the tube with diluted PLUS reagent and mix gently. Add the diluted Lipofectamine LTX to the tube with diluted PLUS reagent/DNA and mix gently. Incubate for 20 minutes at room temperature. After incubation, remove the media from the BHK flask(s). Add the Lipofectamine LTX/PLUS reagent/DNA mixture drop-wise to the flask of BHK cells (˜1 ml). Add 4 ml DMEM transfection medium (DMEM+1% FCS) to the flask(s) and mix gently. Incubate the flask(s) at 37° C. with 5% CO₂ for 24 hours. Seed Vero E6 cells in a T25 flask(s) at ˜1.5-2×10⁶ cells in DMEM growth medium (DMEM+5% FCS) and incubate overnight at 37° C. with 5% CO₂.

### Day 3 Onwards—Propagation & Harvest of Passage 0 Virus

[0416] Discard the media from the Vero E6 cells. Flush/scrape the transfected BHK cells from the flask and directly transfer the cell/media suspension into the flask of Vero E6 cells. Incubate the Vero E6/BHK cells at 37° C. with 5% CO₂. Monitor the cells for cytopathic effect (CPE) daily. Once sufficient signs of CPE are evident (for wild type virus this is usually between 48-72 hours post-transfer of BHK cells onto Vero E6 cells) freeze the flask(s) for 1 hr-overnight. Thaw frozen cell culture flask(s) and collect the thawed cell suspension(s) into a 15 ml tube(s). Centrifuge cell suspension(s) at ˜2000 g for 5 min to pellet the cell debris. Collect clarified supernatant(s) and filter through a 0.22 μm syringe filters and aliquot into sterile 2 mL screw-cap cryo tubes. Transfer viral aliquot cryo tubes into 5 ml tubes (samples are now double contained). Store virus aliquots at −80° C. until ready to perform SARS-COV-2 plaque assay.

### Propagation of Passage 1+ Virus

[0417] Thaw an aliquot of passage 0 virus. Remove the media from a T75 flask(s) of Vero E6 cells with ˜7-8×10⁶ cells and wash once with sterile PBS. Infect Vero E6 cells with passage 0 virus at MOI 0.1-1 diluted in 3-5 ml serum free DMEM. Incubate Vero E6 flask at 37° C. with 5% CO₂ for 1 hour with periodic rocking to ensure the cells are in contact with the infection mixture. After 1 hour top up the Vero E6 flask with 3-5 ml DMEM+2% FCS and incubate at 37° C. with 5% CO₂. Monitor the cells for cytopathic effect (CPE) daily. Once sufficient signs of CPE are evident freeze the flask(s) for 1 hr-overnight. Thaw frozen cell culture flask(s) and collect the thawed cell suspension(s) into a 15 ml tube(s). Centrifuge cell suspension(s) at ˜2000 g for 5 min to pellet the cell debris. Collect clarified supernatant(s) and filter through a 0.22 μm syringe filters and aliquot into sterile 2 mL screw-cap cryo tubes. Transfer viral aliquot cryo tubes into 5 ml tubes (samples are now double contained). Store virus aliquots at −80° C. until ready to perform SARS-COV-2 plaque assay.

### Results

### Growth of Clones

[0418] As shown in FIG. 17, SARS-COV-2 and SARS-COV-2-160-7 both grew to a similar titer (at approx. 7.5×10⁵ PFU/ml) at day 1 (24h) post infection, which were significantly higher than the titers of SARS-COV-2-4N-1 (approx. 6×10⁴ PFU/ml) and SARS-COV-2-7N-1 (approx. 1×10⁴ PFU/ml).

[0419] At day 2 (48h) post infection, SARS-COV-2, SARS-COV-2-160-7 and SARS-COV-2-4N-1 all grew to approx. 1×10⁶ PFU/ml, while SARS-COV-2-7N-1 reached approx. 6× 10⁴ PFU/ml.

[0420] At day 3 (72h) post infection, all the four strains showed reduced titer compared to day 2 post infection, which may be due to the excessive cell death.

### CPE Day 1 Post Infection

[0421] Mock: no sign of CPE (FIG. 18A); SARS-COV-2: early sign of CPE (FIG. 18B); SARS-COV-2-160-7: early sign of CPE (FIG. 18C); SARS-COV-2-4N-1: no sign of CPE (FIG. 18D); and SARS-COV-2-7N-1: no sign of CPE (FIG. 18E).

### CPE Day 2 Post Infection

[0422] Mock: no sign of CPE (FIG. 19A); SARS-COV-2: 80-90% CPE (FIG. 19B); SARS-COV-2-160-7: 80-90% CPE (FIG. 19C); SARS-COV-2-4N-1-7 Day 2 post infection: 5-10% CPE (FIG. 19D); and SARS-COV-2-7N-1-7 Day 2 post infection: 5-10% CPE (FIG. 19E).

### CPE Day 3 Post Infection

[0423] Mock: no sign of CPE (FIG. 20A); SARS-COV-2: 95% CPE (FIG. 20B); SARS-COV-2-160-7: 85-90% CPE (FIG. 20C); SARS-COV-2-4N-1: 75-85% CPE (FIG. 20D); and SARS-COV-2-7N-1: 70-80% CPE (FIG. 20E).

[0424] All clones based on SARS-COV-2-77 showed CPE in Vero E6 cells, but growth curve kinetic studies were not undertaken.

### Example 9—Severe Acute Respiratory Syndrome Coronavirus 2 (SARS-COV-2) Plaque Assay

[0425] This Example describes determining the viral titre of SARS-COV-2 samples using the plaque assay technique.

### Day 1—Plating Cells

[0426] Seed Vero E6 cells in 12-well tissue culture plate(s) at ˜2×10⁵ cells per well in DMEM growth medium (DMEM+5% FCS) and incubate overnight at 37° C. with 5% CO₂ in PC2.

### Day 2—Virus Dilution & Inoculation

[0427] Thaw virus sample(s) and make 10-fold serial dilutions of sample(s) using DMEM dilution/infection medium (DMEM serum free) in a sterile 96-well U-bottom plate(s). Prepare enough diluted virus to do each dilution in duplicate. Remove the media from the cell culture wells and wash cells once with sterile PBS. Remove the PBS from the cells and inoculate the appropriate wells with 200 μl of diluted viral solutions. Incubate the plate(s) at 37° C. 5% CO₂ for 1 hour with periodic rocking to ensure the cells are in contact with the infection mixture. During the incubation period prepare Avicel overlay by mixing 2.4% Avicel RC-581 with 2× overlay medium (2× DMEM+2% FCS) at a 1:1 ratio. Final concentration=1.2% Avicel+DMEM+1% FCS. After 1 hr incubation remove the viral inocula from the wells using a pipette then discard the liquid waste into the tube with F10SC. Overlay cells with 1 mL of 1.2% Avicel overlay mixture. Incubate cells for 72 hours at 37° C., 5% CO₂.

### Day 5—Fixing & Staining

[0428] Fix plates by working with one plate at a time, manually remove the 1.2% Avicel overlay from monolayers using a pipette then discard the waste into the tube with F10SC. Immediately rinse plates with PBS. Repeat this rinse one to two more times if a lot of residual Avicel is still present. Immediately fix and stain the cells with 0.1% Crystal Violet: 3.7% Formaldehyde (CV:FA) for at least 30 minutes at room temperature. Following staining and fixation, remove stain solution from the wells and rinse any remaining CV:FA with water. Allow plates to air dry in a BSL2 cabinet. Count the number of plaques in the wells and then calculate the number of plaque forming units per ml (pfu/ml) using the following formula:

$$pfu / ml = N / ( D \times V )$$

[0429] N=number of plaques counted
[0430] D=dilution factor (e.g. 0.0001 for 1×10⁻⁴)
[0431] V=volume of diluted virus in ml added to well (e.g. 0.2 ml)

### Results

[0432] SARS-COV-2 formed plaques of a similar size with a round shape. Compared to the de-optimized strains/candidates, the plaques are bigger and have clearer boundaries (FIG. 21A).

[0433] SARS-COV-2-160-7 formed plaques of two sizes. Approximately 85% of the plaques are small plaques that have blur boundaries and irregular shapes. Approximately 15% of the plaques are bigger and similar to the WT strains (FIG. 21B).

[0434] SARS-COV-2-4N-1 had plaques of similar sizes in irregular shapes. When compared to the WT stain, the plaques are much smaller and have blurred boundaries (FIG. 21C).

[0435] SARS-COV-2-7N-1 had plaques of similar sizes in irregular shapes. When compared to the WT stain, the plaques are much smaller and have blurred boundaries and are similar in phenotypes to SARS-COV-2-4N-1 (FIG. 21D).

### Example 10—Testing Second Generation Vaccine Candidate Safety, for Cell and Tissue Damage and Reactive Inflammation in Hamsters

[0436] We tested the safety of the vaccine candidates in a hamster model. Hamsters were infected intranasally with 10⁵ PFU of vaccine candidates and wild-type SARS-COV-2. Lung pathology was assessed in infected hamsters, for cell and tissue damage and reactive inflammation. See FIG. 26A-D and Table 2 below. A 5-step grading system of minimum, mild, moderate, marked and severe was used to rank microscopic findings for comparison among groups.

TABLE 2

| | | Day/Incident (No. of | | | |
|---|---|---|---|---|---|
| Group | | animals showing lesions) | | | |
| Day | Group | 3 | 5 | 7 | 14 |
| Cell and tissue damage | | | | | |
| Necrosis of BEC | Wildtype | 4 | 3 | 0 | 0 |
| | 77-7 | 4 | 4 | 2 | 0 |
| | 4N-1 | 3 | 2 | 0 | 0 |
| | 7N-1 | 0 | 3 | 0 | 0 |
| | 160-4 | 0 | 1 | 0 | 0 |
| | 160-7 | 1 | 0 | 0 | 0 |
| | Uninfected | 0 | 0 | 0 | 0 |
| Cellular debris in bronchi | Wildtype | 4 | 4 | 2 | 0 |
| | 77-7 | 4 | 2 | 2 | 0 |
| | 4N-1 | 3 | 2 | 0 | 0 |
| | 7N-1 | 0 | 0 | 0 | 0 |
| | 160-4 | 0 | 0 | 1 | 0 |
| | 160-7 | 1 | 0 | 0 | 0 |
| | Uninfected | 0 | 0 | 0 | 0 |
| Diffuse alveolar damage | Wildtype | 3 | 4 | 4 | 3 |
| | 77-7 | 1 | 4 | 4 | 3 |
| | 4N-1 | 2 | 4 | 4 | 3 |
| | 7N-1 | 0 | 2 | 4 | 4 |
| | 160-4 | 1 | 2 | 3 | 4 |
| | 160-7 | 4 | 3 | 4 | 1 |
| | Uninfected | 0 | 0 | 0 | 0 |
| Necrosis of AEC | Wildtype | 3 | 4 | 0 | 1 |
| | 77-7 | 1 | 4 | 4 | 0 |
| | 4N-1 | 2 | 4 | 4 | 1 |
| | 7N-1 | 0 | 3 | 3 | 2 |
| | 160-4 | 2 | 3 | 3 | 3 |
| | 160-7 | 4 | 3 | 4 | 0 |
| | Uninfected | 0 | 0 | 0 | 0 |
| Cellular debris in alveoli | Wildtype | 3 | 4 | 4 | 2 |
| | 77-7 | 1 | 4 | 4 | 1 |
| | 4N-1 | 2 | 4 | 4 | 1 |
| | 7N-1 | 0 | 3 | 4 | 2 |
| | 160-4 | 3 | 3 | 4 | 3 |
| | 160-7 | 4 | 3 | 4 | 1 |
| | Uninfected | 0 | 0 | 0 | 0 |
| Alveolar emphysema | Wildtype | 3 | 4 | 4 | 2 |
| | 77-7 | 1 | 4 | 4 | 1 |
| | 4N-1 | 2 | 3 | 3 | 0 |
| | 7N-1 | 0 | 2 | 2 | 0 |
| | 160-4 | 1 | 1 | 0 | 0 |
| | 160-7 | 3 | 2 | 0 | 0 |
| | Uninfected | 0 | 0 | 0 | 0 |
| Reactive inflammatory patterns | | | | | |
| Necrosuppurative bronchitis | Wildtype | 0 | 1 | 0 | 0 |
| | 77-7 | 2 | 0 | 0 | 0 |
| | 4N-1 | 1 | 0 | 0 | 0 |
| | 7N-1 | 0 | 0 | 0 | 0 |
| | 160-4 | 0 | 0 | 0 | 0 |
| | 160-7 | 0 | 0 | 0 | 0 |
| | Uninfected | 0 | 0 | 0 | 0 |
| Bronchointerstitial pneumonia | Wildtype | 0 | 1 | 0 | 0 |
| | 77-7 | 0 | 0 | 0 | 0 |
| | 4N-1 | 1 | 0 | 0 | 0 |
| | 7N-1 | 0 | 0 | 0 | 0 |
| | 160-4 | 0 | 0 | 0 | 0 |
| | 160-7 | 0 | 0 | 0 | 0 |
| | Uninfected | 0 | 0 | 0 | 0 |
| Intraalveolar neutrophils and | Wildtype | 3 | 4 | 4 | 3 |
| macrophages | | | | | |
| | 77-7 | 1 | 4 | 4 | 2 |
| | 4N-1 | 3 | 4 | 4 | 1 |
| | 7N-1 | 0 | 3 | 4 | 2 |
| | 160-4 | 3 | 3 | 4 | 4 |
| | 160-7 | 4 | 3 | 4 | 1 |
| | Uninfected | 0 | 0 | 0 | 0 |
| Lymphocytes | Wildtype | 4 | 4 | 4 | 3 |
| | 77-7 | 4 | 4 | 4 | 1 |
| | 4N-1 | 4 | 4 | 4 | 0 |
| | 7N-1 | 2 | 4 | 4 | 2 |
| | 160-4 | 4 | 4 | 4 | 4 |
| | 160-7 | 4 | 4 | 4 | 2 |
| | Uninfected | 0 | 0 | 0 | 0 |
| Polymorphonuclear granulocytes | Wildtype | 4 | 4 | 4 | 2 |
| (neutrophils, heterophils) | | | | | |
| | 77-7 | 4 | 4 | 4 | 1 |
| | 4N-1 | 4 | 4 | 4 | 0 |
| | 7N-1 | 2 | 4 | 4 | 2 |
| | 160-4 | 4 | 4 | 4 | 4 |
| | 160-7 | 4 | 4 | 4 | 2 |
| | Uninfected | 0 | 0 | 0 | 0 |
| Monocytes, macrophages | Wildtype | 3 | 4 | 4 | 3 |
| | 77-7 | 4 | 4 | 4 | 4 |
| | 4N-1 | 3 | 4 | 4 | 3 |
| | 7N-1 | 0 | 3 | 4 | 4 |
| | 160-4 | 1 | 4 | 4 | 4 |
| | 160-7 | 4 | 3 | 4 | 2 |
| | Uninfected | 0 | 0 | 0 | 0 |
| Perivascular lymphocytic cuffing | Wildtype | 4 | 4 | 4 | 3 |
| | 77-7 | 4 | 4 | 4 | 0 |
| | 4N-1 | 3 | 4 | 4 | 0 |
| | 7N-1 | 0 | 4 | 4 | 2 |
| | 160-4 | 3 | 4 | 4 | 4 |
| | 160-7 | 4 | 4 | 4 | 3 |
| | Uninfected | 0 | 0 | 0 | 0 |
| Activation of mesothelial cells | Wildtype | 0 | 0 | 0 | 0 |
| | 77-7 | 0 | 1 | 0 | 0 |
| | 4N-1 | 0 | 0 | 0 | 0 |
| | 7N-1 | 0 | 0 | 0 | 0 |
| | 160-4 | 1 | 1 | 0 | 0 |
| | 160-7 | 1 | 0 | 0 | 0 |
| | Uninfected | 0 | 0 | 0 | 0 |

Key: n = 4 on each day except n = 2 for uninfected

[0437] A discussion of the results follows.

### Wild-Type SARS-COV-2

[0438] Day 3: Clear evidence of tissue damage and reactive inflammatory cells.
[0439] Day 5: Clear evidence of tissue damage and reactive inflammatory cells.
[0440] Day 7: Clear evidence of tissue damage and reactive inflammatory cells.
[0441] Day 14: Evidence of tissue damage and reactive inflammatory cells but reduced in intensity compared to earlier time points.

### Vaccine Candidates

[0442] Day 3: Clear evidence of tissue damage and reactive inflammatory cells in the lungs of hamsters infected with candidates 77-7, 4N-1, 160-4 and 160-7. Minimal damage with candidates 7N-1 but not as prominent.
[0443] Day 5: Substantial tissue damage and reactive inflammatory cell infiltration, with candidate 7N-1 significantly lower than candidates 77-7, 4N-1, 160-4 and 160-7.
[0444] Day 7: Clear evidence of tissue damage with candidates 77-7, 4N-1 and 160-4. Candidate 160-7 showed considerably reduced tissue damage and candidate 7N-1 showed negligible tissue damage.
[0445] Day 14: Tissue damage and reactive inflammatory cells were reduced in intensity compared to earlier time points. Candidate 7N-1 showed negligible tissue damage.

### Example 11—Testing Vaccine Safety: Distribution of Lesions, Bronchial and Peribronchial Distribution of Inflammatory Cells

[0446] We tested the safety of the vaccine in a hamster model. Hamsters were infected intranasally with 10⁵ PFU of vaccine candidates and wild-type SARS-COV-2. Lung pathology was assessed in infected hamsters, for distribution of lesions, bronchial and peribronchial distribution of inflammatory cells. See FIG. 27A-D and Table 3 below. A 5-step grading system of minimum, mild, moderate, marked and severe was used to rank microscopic findings for comparison among groups.

TABLE 3

| | | Day/Incident (No. of | | | |
|---|---|---|---|---|---|
| Group | | animals showing lesions) | | | |
| Day | Group | 3 | 5 | 7 | 14 |
| Overall severity | | | | | |
| % of lung area affected | Wildtype | 10 | 55 | 55 | 19 |
| Mean | 77-7 | 4.50 | 28.75 | 28.75 | 4.50 |
| | 4N-1 | 15.50 | 17.50 | 31.25 | 3.00 |
| | 7N-1 | 0.50 | 3.50 | 4.75 | 3.25 |
| | 160-4 | 4.75 | 17.00 | 14.00 | 10.25 |
| | 160-7 | 14.75 | 14.00 | 21.75 | 1.25 |
| | Uninfected | 0.00 | 0.00 | 0.00 | 0.00 |
| Distribution of lesions | | | | | |
| Bronchial and peribronchial | Wildtype | 4 | 4 | 4 | 3 |
| | 77-7 | 4 | 4 | 4 | 4 |
| | 4N-1 | 4 | 4 | 2 | 3 |
| | 7N-1 | 2 | 4 | 1 | 4 |
| | 160-4 | 3 | 4 | 3 | 4 |
| | 160-7 | 4 | 4 | 2 | 1 |
| | Uninfected | 0 | 0 | 0 | 0 |
| Patchy throughout the lungs | Wildtype | 3 | 4 | 4 | 3 |
| | 77-7 | 1 | 4 | 4 | 3 |
| | 4N-1 | 2 | 4 | 4 | 1 |
| | 7N-1 | 0 | 3 | 4 | 2 |
| | 160-4 | 1 | 3 | 4 | 4 |
| | 160-7 | 4 | 3 | 4 | 1 |
| | Uninfected | 0 | 0 | 0 | 0 |

Key: n = 4 on each day except n = 2 for uninfected

[0447] A discussion of the results follows.

### Wild-Type SARS-COV-2

[0448] At days 3, 5, 7 and 14 there was marked bronchial and peribronchial distribution of inflammatory cells, with a slight reduction in the extent and intensity of inflammation at day 14 compared to the earlier time points. At days 3, 5 and 7 there was a patchy distribution of inflammatory cells throughout the lungs.

### Vaccine Candidates

[0449] Day 3: pronounced following infection with vaccine candidates 77-7 and 4N-1. Bronchial and peribronchial distribution of inflammatory cells was not as intense with vaccine candidates 7N-1. 160-4 and 160-7, with candidate 7N-1 similar to that in uninfected hamsters.
[0450] Day 5: Intense bronchial and peribronchial distribution of inflammatory cells with candidates 77-7 and 4N-1, substantially less in the lungs of hamsters infected with candidates 7N-1, 160-4 and 160-7.
[0451] Day 7: Intensity greatest for candidates 77-7 and 4N-1, with candidate 160-4 showing less intense distribution of inflammatory cells. Distribution of inflammatory cells was lowest for candidates 7N-1 and 160-7.
[0452] Day 14: Distribution of inflammatory cells was less than at earlier time points, with candidate 7N-1 showing particularly low levels of inflammatory cells.

[0453] Histopathological changes were observed in wildtype SARS-COV-2-infected groups on 3 day post infection (dpi) and time-dependent increase in severity of % lungs affected was observed on 5 dpi and 7 dpi. However, there was decrease in severity on 14 dpi. The % lungs affected was higher in wildtype SARS-COV-2-infected groups (55%) on 7 dpi which was well correlated with the distribution of lesions, cellular and tissue damage, circular changes, vascular lesions and reactive inflammatory patterns. Minimal to mild patchy lesions around bronchial and peribronchial were recorded in lungs of all SARS-COV-2-infected animals.

[0454] Histopathological changes were observed in all SARS-COV-2-infected groups on 3 dpi and time-dependent increase in severity of % lungs affected was observed on 5 dpi and 7 dpi. However, there was decrease in severity in all the groups on 14 dpi except marginal decrease in candidate 160-4. The % lungs affected was higher in candidate 4N-1 (31.25%) followed candidates 77-7 (28.75%), 160-7 (21.75%), 160-4 (14.00%) and 7N-1 (4.75%) on 7 dpi which was well correlated with the distribution of lesions, cellular and tissue damage, circular changes, vascular lesions and reactive inflammatory patterns. Minimal to mild patchy lesions around bronchial and peribronchial were recorded in lungs of all SARS-COV-2-infected animals.

### Example 12—Testing Vaccine Safety, for Circulatory and Vascular Lesions, Including Perivascular Edema, Desquamation of Endothelial Cells and Endothelialitis

[0455] We tested the safety of the vaccine candidates in a hamster model. Hamsters were infected intranasally with 10⁵ PFU of vaccine candidates and wild-type SARS-COV-2. Lung pathology was assessed in infected hamsters, for circulatory and vascular lesions, including perivascular edema, desquamation of endothelial cells and endothelialitis. See FIG. 28A-D and Table 4 below. A 5-step grading system of minimum, mild, moderate, marked and severe was used to rank microscopic findings for comparison among groups.

TABLE 4
Group

| Day | | Day/Incident (No. of | | | |
|---|---|---|---|---|---|
| Circulatory changes and | | animals showing lesions) | | | |
| vascular lesions | Group | 3 | 5 | 7 | 14 |
| Alveolar hemorrhage | Wildtype | 3 | 4 | 4 | 2 |
| | 77-7 | 1 | 4 | 3 | 1 |
| | 4N-1 | 2 | 4 | 3 | 0 |
| | 7N-1 | 0 | 3 | 3 | 2 |
| | 160-4 | 0 | 2 | 1 | 0 |
| | 160-7 | 3 | 3 | 2 | 0 |
| | Uninfected | 0 | 0 | 0 | 0 |
| Alveolar edema | Wildtype | 3 | 4 | 4 | 2 |
| | 77-7 | 1 | 4 | 3 | 0 |
| | 4N-1 | 2 | 4 | 1 | 0 |
| | 7N-1 | 0 | 3 | 1 | 0 |
| | 160-4 | 0 | 2 | 1 | 0 |
| | 160-7 | 2 | 0 | 1 | 0 |
| | Uninfected | 0 | 0 | 0 | 0 |
| Perivascular/interstitial edema | Wildtype | 3 | 4 | 4 | 2 |
| | 77-7 | 3 | 4 | 4 | 1 |
| | 4N-1 | 2 | 3 | 4 | 0 |
| | 7N-1 | 0 | 2 | 3 | 2 |
| | 160-4 | 1 | 1 | 4 | 0 |
| | 160-7 | 4 | 1 | 4 | 0 |
| | Uninfected | 0 | 0 | 0 | 0 |
| Vascular endothelialitis | Wildtype | 4 | 4 | 0 | 0 |
| | 77-7 | 4 | 3 | 1 | 0 |
| | 4N-1 | 3 | 4 | 2 | 0 |
| | 7N-1 | 0 | 4 | 0 | 0 |
| | 160-4 | 2 | 4 | 1 | 0 |
| | 160-7 | 3 | 2 | 0 | 0 |
| | Uninfected | 0 | 0 | 0 | 0 |
| Necrosis and desquamation of | Wildtype | 4 | 2 | 0 | 0 |
| vascular endothelial cells | | | | | |
| | 77-7 | 4 | 0 | 0 | 0 |
| | 4N-1 | 2 | 1 | 0 | 0 |
| | 7N-1 | 0 | 0 | 0 | 0 |
| | 160-4 | 1 | 0 | 0 | 0 |
| | 160-7 | 1 | 0 | 0 | 0 |
| | Uninfected | 0 | 0 | 0 | 0 |

Key: n = 4 on each day except n = 2 for uninfected

[0456] A discussion of the results follows.

### Wild-Type SARS-COV-2

[0457] Vascular lesions were prominent at day 3, day 5 and day 7 but had improved markedly by day 14. Circulatory changes and vascular lesions characterized by alveolar haemorrhage, alveolar edema, perivascular/interstitial edema, vascular endothelialitis and necrosis and desquamation of vascular endothelial cells were recorded in SARS-COV-2-infected lungs of all wild-type SARS-COV-2 animals and the severity of lesions was mild to marked.

### Vaccine Candidates

[0458] Day 3: Some perivascular edema, desquamation of endothelial cells and endothelialitis were observed in hamsters infected with candidates 77-7, 4N-1, 160-4 and 160-7. These pathologies were not present in the 7N-1 group.
[0459] Day 5: Perivascular edema, desquamation of endothelial cells and endothelialitis were prominent in hamsters infected with candidates 77-7, 4N-1 and 160-4, and less intense with candidates 7N-1 and 160-7.
[0460] Day 7: Perivascular edema, desquamation of endothelial cells and endothelialitis were prominent in hamsters infected with candidates 77-7,4N- and 160-4, and less intense with candidates 7N-1 and 160-7.
[0461] Day 14: Perivascular edema, desquamation of endothelial cells and endothelialitis were reduced in all groups compared to earlier time points. Candidates 77-7, 4N-1 and 160-4 still showed some vascular lesions. Vascular lesions were not seen with candidate 7N-1 and were minimal in the 160-7 group.

[0462] Overall conclusion: Circulatory changes and vascular lesions characterized by alveolar haemorrhage, alveolar edema, perivascular/interstitial edema, vascular endothelialitis and necrosis and desquamation of vascular endothelial cells were recorded in lungs of all vaccine-infected animals. The severity of lesions was minimal to mild in candidates 77-7, 4N-1 and 160-4 and minimal in candidates 7N-1 and 160-7.

### Example 13—Testing Second Generation Vaccine Safety, for Regeneration and Repair

[0463] We tested the safety of the vaccine in a hamster model. Hamsters were infected intranasally with 10⁵ PFU of vaccine candidates and wild-type SARS-COV-2. Lung pathology was assessed in infected hamsters, for regeneration and repair. See FIG. 29A-D and Table 5 below. A 5-step grading system of minimum, mild, moderate, marked and severe was used to rank microscopic findings for comparison among groups.

TABLE 5

| Group | | Day/Incident (No. of | | | |
|---|---|---|---|---|---|
| Day | | animals showing lesions) | | | |
| Regeneration and repair | Group | 3 | 5 | 7 | 14 |
| Hyperplasia of BEC | Wildtype | 0 | 4 | 4 | 1 |
| | 77-7 | 0 | 3 | 0 | 0 |
| | 4N-1 | 1 | 2 | 0 | 0 |
| | 7N-1 | 0 | 0 | 0 | 0 |
| | 160-4 | 0 | 0 | 0 | 0 |
| | 160-7 | 1 | 0 | 0 | 0 |
| | Uninfected | 0 | 0 | 0 | 0 |
| Hyperplasia of AEC-II | Wildtype | 0 | 3 | 4 | 3 |
| | 77-7 | 0 | 1 | 4 | 4 |
| | 4N-1 | 0 | 2 | 4 | 3 |
| | 7N-1 | 0 | 0 | 2 | 2 |
| | 160-4 | 0 | 0 | 3 | 1 |
| | 160-7 | 1 | 1 | 1 | 1 |
| | Uninfected | 0 | 0 | 0 | 0 |
| Multinucleated or otherwise | Wildtype | 0 | 0 | 0 | 0 |
| atypical epithelial cells | | | | | |
| | 77-7 | 0 | 0 | 0 | 0 |
| | 4N-1 | 0 | 0 | 0 | 0 |
| | 7N-1 | 0 | 0 | 0 | 0 |
| | 160-4 | 0 | 0 | 0 | 0 |
| | 160-7 | 0 | 0 | 0 | 0 |
| | Uninfected | 0 | 0 | 0 | 0 |
| Pleural fibroblastic | Wildtype | 0 | 0 | 0 | 1 |
| proliferation/fibrosis | | | | | |
| | 77-7 | 0 | 0 | 0 | 0 |
| | 4N-1 | 0 | 0 | 0 | 0 |
| | 7N-1 | 0 | 0 | 0 | 0 |
| | 160-4 | 0 | 0 | 0 | 0 |
| | 160-7 | 0 | 0 | 0 | 0 |
| | Uninfected | 0 | 0 | 0 | 0 |

Key: n = 4 on each day except n = 2 for uninfected

[0464] A discussion of the results follows.

### Wild-Type SARS-COV-2

[0465] Minimal hyperplasia of alveolar epithelial cells was observed at day 3. There was significant hyperplasia of alveolar epithelial cells at day 5 and day 7, with a slight reduction of hyperplasia at day 14. Taken together, these results provide clear indication of the virulence of wild-type SARS-COV-2 in the hamster model, with massive lung pathology.

### Vaccine Candidates

[0466] Day 3: Hyperplasia of alveolar epithelial cells was prominent in candidate 4N-1, and present at reduced levels with candidates 77-7, 160-4 and 160-7. It was not present in candidate 7N-1.
[0467] Day 5: Hyperplasia of alveolar epithelial cells was prominent in candidate 4N-1, and present at reduced levels in candidate 160-7, followed by candidate 77-7 and candidate 160-4. Hyperplasia was minimal in candidate 7N-1.
[0468] Day 7: Hyperplasia of alveolar epithelial cells was prominent in 77-7, 4N-1, 160-4 and 160-7 groups and minimal in candidate 7N-1.
[0469] Day 14: Hyperplasia of alveolar epithelial cells was reduced in all groups compared to earlier time points, with 7N-1 showing best lung integrity of all groups.

[0470] Regeneration and repair characterized by hyperplasia of BEC, hyperplasia of AEC-II, multinucleated or otherwise atypical epithelial cells and pleural fibroblastic proliferation/fibrosis was recorded from day 5 in wildtype SARS-COV-2. No histopathological changes were observed in uninfected group.

[0471] Regeneration and repair characterized by hyperplasia of BEC, hyperplasia of AEC-II, multinucleated or otherwise atypical epithelial cells and pleural fibroblastic proliferation/fibrosis was recorded from day 3 dpi in candidates 4N-1 and 160-7; day 5 in 77-7 and day 7 in 7N-1 and 160-4. No histopathological changes were observed in uninfected group.

### Example 14—Challenge Experiment, Showing the Efficacy of Vaccine Candidate 7N-1 in Mice

[0472] To test the efficacy of candidate 7N-1 as a COVID-19 vaccine, we established a challenge experiment using the following immunisation groups: 10³ PFU 7N-1 intranasal (7N-1 IN); 10⁵ PFU 7N-1 subcutaneous (7N-1 SC); 10³ PFU wild-type mouse-adapted SARS-COV-2 (SARS-COV-2 MA10) intranasal (WT nCOV); and unimmunised (PBS treated). HFH4-hACE2 mice were used in this study. HFH4-hACE2 mice expressed high levels of hACE2 in the lung, but varying expression levels in other tissues. See FIG. 30.

[0473] In the first 7 days post-immunisation: (i) we did not see any disease in mice given 10³ PFU 7N-1 intranasal; 10⁵ PFU 7N-1 subcutaneous; and unimmunised (PBS treated); (ii) severe disease and death was observed in 1 mouse given 10³ PFU wild-type mouse-adapted SARS-COV-2 (SARS-COV-2 MA10) intranasal.

[0474] Three weeks later, the mice were challenged with 10⁵ PFU intranasal wild-type mouse-adapted SARS-COV-2 (SARS-COV-2 MA10) and monitored over a 12-day period. 7N-1 vaccination provided strong protection from SARS-COV-2 challenge, with 100% survival in the intranasal group (green line—triangle symbol) and 65% survival in the subcutaneous group (red line—square symbol). Two mice in the 7N-1 subcutaneous vaccinated group die, although later than the unimmunised group. Death in this group is likely related to the reduced receptor expression in the periphery. All unimmunised mice died from challenge with SARS-COV-2 MA10 (blue line—PBS). Immunisation with wild-type mouse-adapted SARS-COV-2 (SARS-CoV-2 MA10—inverted triangle symbol) provided partial protection (25% survival).

### Summary

[0475] 7N-1 (n=4 mice) provided full protection from rechallenge mortality when given intranasal route in HFH4-hACE2 mice.
[0476] 7N-1 (n=5 mice) provided partial protection from subcutaneous route, which is probably related to the reduced receptor expression in the periphery. Death occurred later than the unvaccinated group.
[0477] Wild type virus (n=3 mice) intranasal resulted in 1 death during the primary infection, and an additional death following rechallenge.
[0478] PBS prime (n=5) showed full mortality upon wild type rechallenge.

### Example 15—Preclinical Immunogenicity Data in Animal Models

[0479] Hamsters were immunised intranasally with 10⁵ PFU with 7N-1, 4N-1, 77-7, 160-4 or 160-7 vaccine candidates. The mean neutralizing antibody titers (PRNT₁₀₀) at day 14 following immunization were determined and are shown in Table 6. Vaccine candidates 7N1, 160/7 and 160/4 were all highly immunogenic in the hamster model of infection, inducing a strong neutralizing antibody response.

TABLE 6

Average plaque count of Virus control- 138.8
Values represents the end point serum
dilution where 100% neutralization is observed

| | Animal-1 | Animal-2 | Animal-3 | Animal-4 |
|---|---|---|---|---|
| 160-7 | 640 | 640 | 1280 | 1280 |
| 160-4 | 40 | 40 | 1280 | 80 |
| 77-7 | 80 | 80 | 40 | 160 |
| 4N-1 | 40 | 40 | 40 | 40 |
| 7N-1 | 40 | 40 | 640 | 640 |

TABLE 7
Average plaque count of virus control-202.2
Values represent the end point serum dilution where 100%, 90% & 50% neutralization is observed

| | 160-7(100%) | 160-7(90%) | 160-7(50%) | 7N-1 (100%) | 7N-1 (90%) | 7N-1 (50%) |
|---|---|---|---|---|---|---|
| Animal-1 | <40 | — | — | 160 | 320 | >1280 |
| Animal-2 | 80 | 640 | >1280 | 80 | 640 | >1280 |
| Animal-3 | 40 | 640 | >1280 | <40 | — | — |
| Animal-4 | 40 | 320 | >1280 | <40 | — | — |
| Animal-5 | 40 | 320 | >1280 | 80 | 160 | >1280 |
| Animal-6 | 40 | 320 | >1280 | 80 | 320 | >1280 |
| Animal-7 | 80 | 640 | >1280 | 80 | 160 | >1280 |
| Animal-8 | 40 | 320 | >1280 | 80 | 160 | >1280 |
| Animal-9 | <40 | — | — | 80 | 160 | >1280 |
| Animal-10 | <40 | — | 640 | 40 | 160 | >1280 |
| Animal-11 | 40 | 320 | >1280 | <40 | — | 40 |
| Animal-12 | 40 | 320 | >1280 | 160 | 640 | >1280 |
| Animal-13 | 80 | 320 | >1280 | 160 | 640 | >1280 |
| Animal-14 | 40 | 320 | >1280 | 80 | 160 | >1280 |
| Animal-15 | 40 | 320 | >1280 | 40 | 160 | >1280 |
| Animal-16 | 80 | 640 | >1280 | 320 | 640 | >1280 |

[0480] The two candidates 7N-1 and 160-7 were highly immunogenic in the hamster model of infection, inducing a strong neutralizing antibody response. Hamsters were immunised subcutaneously with 10⁴ PFU 7N-1 or 160-7 vaccine candidates. At day 14 following immunization, blood was collected to determine neutralization titres. Mean PRNT₅₀ was 1280 for both vaccine candidates and mean PRNT₉₀ was 640 for 7N-1 and 640 for 160-7. Sec Table 7. Based on its high level of attenuation and safety in the mouse and hamster infection models, we selected 7N1 as our lead candidate for further analysis.

[0481] Hamsters were given single dose of 10⁴ PFU of live attenuated virus candidates 160-7 or 7N-1 subcutaneously. Neutralizing antibody titres were determined on day 14 after immunisation with live attenuated virus. The results are shown in FIG. 31. At 14 days post-vaccination, vaccinated hamsters showed very strong antibody neutralization in the blood. At 100% of neutralization, titres for 7N-1 100% were significantly higher that for 160-7. At 50% and 90% of neutralization, there was no significant difference in neutralization titres between 7N-1 and 160-7.

### Example 16—Vaccine Plaque Size after Multiple In Vitro Passage

[0482] Vaccine candidates 7N-1, 77-7, 4N-1, 160-4 and 160-7 were passaged 4 times in Vero GMP cells at multiplicity of infection of 0.01 PFU/cell. Each dot represents one plaque. Vaccine candidates 4N-1 (FIG. 32E) and 7N-1 (FIG. 32F) have a small plaque phenotype compared to wildtype SARS-COV-2 (FIG. 32A) and the other vaccine candidates 77-7 (FIG. 32C), 160-4 (FIG. 32D) and 160-7 (FIG. 32B). Plaque size between wildtype SARS-COV-2 (FIG. 32A) and vaccine candidates 77-7 (FIG. 32C), 160-4 (FIG. 32D) and 160-7 (FIG. 32B) were similar.

[0483] Small plaques demonstrate a reduced ability of the vaccine to spread from the initial site of infection. This serves as useful marker of vaccine attenuation. To determine the phenotypic stability of vaccine attenuation extended in vitro passage of vaccine candidates and wildtype SARS-COV-2 was performed four times in Vero GMP cells. The plaque size of 4N-1 (FIG. 32E) and 7N-1 (FIG. 32F) remained smaller than wildtype SARS-COV-2 (FIG. 32A) after four passages. 4N-1 (FIG. 32E) and the lead vaccine candidate 7N-1 (FIG. 32F) did not revert to a wildtype plaque phenotype (FIG. 32A).

### Example 17—Vaccine Candidate 7N-1

[0484] The live attenuated SARS-COV-2 (COVID 19) vaccine described herein is based on codon de-optimization technology, which is a promising approach for achieving an enhanced safety profile (cannot revert to virulent strain), and is designed as a prophylactic, active, single dose immunization against coronavirus in humans. The vaccine should provide long-lasting protection, probably with single dose administration, and an anticipated safety profile similar to licensed vaccines for active immunization.

[0485] Live attenuated vaccines are well-known to induce a very strong immune response and to elicit both cell-mediated and humoral immune responses. To overcome the risk of reversion associated with ‘live attenuated’ vaccines we have developed the ‘live attenuated SARS-COV-2’ vaccine using codon de-optimisation technology. Using this approach, the whole virus (Wuhan isolate) is synthetically created by varying its nucleotide sequences (codons) such that all the structural proteins that generate immune response remain unaltered, while the number of non-structural proteins required for replication are altered thereby attenuating the virus. While live attenuated vaccines are well known to induce a strong immune response there is also a risk of reversion of mutation, generally this risk exists when the attenuated virus has a limited number of mutations. To address this risk, we have created a large number of mutations, thereby virtually eliminating this risk.

[0486] We first generated a synthetic SARS-COV-2 infectious clone based on the Wuhan strain. Next, we designed and constructed attenuated COVID-19 vaccine candidates using codon de-optimisation. For our leading vaccine candidate 7N-1, we introduced a large number of silent mutations (a total of 97 codon changes in the non-structural proteins 3 [nsP3] and 4 [nsP4]) in the replicative genes, but not in the structural proteins of the virus. There is essentially no risk of reversion to virulence due to the large number of substitutions in the gene sequences. The lead candidate, 7N-1, is highly attenuated, replicating to very low levels in mammalian cells and exhibiting a classic ‘small plaque phenotype’ indicative of a high level of attenuation (see FIGS. 33-7N-1 is labelled ‘LAV’). Small plaques demonstrate a reduced ability of the vaccine to spread from the initial site of infection. This serves as useful marker of vaccine attenuation. The attenuated ‘small plaque’ phenotype is maintained through extended tissue culture passage (see FIG. 32F), providing a strong indication that the virus is stable and will not revert to virulence.

### Safety Data in Mice

[0487] Mice infected with live attenuated vaccine 7N-1 show no signs of disease. Infection of mice with wildtype SARS-COV-2 results in substantial weight loss and disease followed by death by 7-8 days post-infection. To determine vaccine safety human ACE2 (hACE-2) transgenic mice were infected intranasally with high dose (10⁵ PFU) 7N-1 and monitored over a 10-day period. The mice exhibited no weight loss or any other disease signs. In contrast, mice infected with 10⁵ PFU wild-type SARS-COV-2 suffered substantial weight loss and died within 8 days (see FIG. 34). In contrast, mice inoculated with vaccine 7N-1 survived (see FIG. 34—labelled ‘LAV’). Thus, the vaccine is highly attenuated in mice and is safe.

[0488] Vaccinated mice show no signs of disease after challenge with wildtype SARS-CoV-2. To test whether the vaccine protects against lethal infection with wildtype SARS-COV-2, hACE-2 transgenic mice were immunised with 10³ PFU 7N-1 intranasally followed by challenge three weeks later with 10⁵ PFU wild-type SARS-COV-2 intranasally. Infection of unimmunised mice with wild-type SARS-COV-2 resulted in 100% mortality within seven days. In contrast, immunised mice were completely protected, with no mortality (see FIG. 35). The data demonstrate the protective effects of candidate 7N-1 vaccine against a lethal challenge with wild-type SARS-COV-2.

### Safety Data in Hamsters

[0489] Hamsters infected with live attenuated vaccine show no signs of disease. To further evaluate vaccine safety, hamsters were infected intranasally with a high dose (10⁵ PFU) of vaccine candidate 7N-1 or wild-type SARS-COV-2. At days 3, 5, 7 and 14 post-infection, groups of hamsters were sacrificed for histological evaluation of lung pathology. Lung tissue sections were evaluated in a blinded fashion by experienced histopathologists at Vimta Labs Ltd (Hyderabad). Hamsters given candidate 7N-1 showed minimal lung pathology, with pathology readout scores of 3-4.5% on days 5 and 7 (days when peak inflammation is expected) while uninfected hamsters scored 0%. See Table 8 below for scores from individual animal.

TABLE 8

| Group | Vaccine 7N-1 | | | | | | | | | | | | | | | |
|---|---|---|---|---|---|---|---|---|---|---|---|---|---|---|---|---|
| Day | Day 3 | | | | Day 5 | | | | Day 7 | | | | Day 14 | | | |
| Animal No | 1 | 2 | 3 | 4 | 5 | 6 | 7 | 8 | 9 | 10 | 11 | 12 | 13 | 14 | 15 | 16 |
| Overall severity | | | | | | | | | | | | | | | | |
| % of lung area affected | 1 | 0 | 0 | 1 | 5 | 3 | 5 | 1 | 15 | 2 | 1 | 1 | 1 | 2 | 5 | 5 |
| Mean | 0.5 | | | | 3.5 | | | | 4.75 | | | | 3.25 | | | |
| Distribution of lesions | | | | | | | | | | | | | | | | |
| Bronchial and | 1 | 0 | 0 | 1 | 1 | 2 | 1 | 1 | 1 | 0 | 0 | 0 | 1 | 2 | 1 | 1 |
| peribronchial | | | | | | | | | | | | | | | | |
| Patchy throughout the | 0 | 0 | 0 | 0 | 2 | 0 | 1 | 1 | 2 | 1 | 2 | 1 | 0 | 0 | 2 | 2 |
| lungs | | | | | | | | | | | | | | | | |
| Cell and tissue damage | | | | | | | | | | | | | | | | |
| Necrosis of BEC | 0 | 0 | 0 | 0 | 0 | 1 | 1 | 1 | 0 | 0 | 0 | 0 | 0 | 0 | 0 | 0 |
| Cellular debris in bronchi | 0 | 0 | 0 | 0 | 0 | 0 | 0 | 0 | 0 | 0 | 0 | 0 | 0 | 0 | 0 | 0 |
| Diffuse alveolar damage | 0 | 0 | 0 | 0 | 1 | 0 | 1 | 0 | 2 | 1 | 1 | 1 | 1 | 2 | 2 | 2 |
| Necrosis of AEC | 0 | 0 | 0 | 0 | 1 | 0 | 1 | 1 | 1 | 0 | 1 | 1 | 0 | 0 | 1 | 1 |
| Cellular debris in alveoli | 0 | 0 | 0 | 0 | 1 | 0 | 1 | 1 | 2 | 1 | 1 | 1 | 0 | 0 | 1 | 1 |
| Alveolar emphysema | 0 | 0 | 0 | 0 | 1 | 0 | 1 | 0 | 1 | 0 | 1 | 0 | 0 | 0 | 0 | 0 |
| Circulatory changes and | | | | | | | | | | | | | | | | |
| vascular lesions | | | | | | | | | | | | | | | | |
| Alveolar hemorrhage | 0 | 0 | 0 | 0 | 1 | 0 | 1 | 1 | 1 | 1 | 1 | 0 | 0 | 0 | 1 | 1 |
| Alveolar edema | 0 | 0 | 0 | 0 | 1 | 0 | 1 | 1 | 0 | 0 | 1 | 0 | 0 | 0 | 0 | 0 |
| Perivascular/interstitial | 0 | 0 | 0 | 0 | 1 | 0 | 1 | 0 | 1 | 0 | 1 | 1 | 0 | 0 | 1 | 1 |
| edema | | | | | | | | | | | | | | | | |
| Vascular endothelialitis | 0 | 0 | 0 | 0 | 1 | 1 | 1 | 1 | 0 | 0 | 0 | 0 | 0 | 0 | 0 | 0 |
| Necrosis and | 0 | 0 | 0 | 0 | 0 | 0 | 0 | 0 | 0 | 0 | 0 | 0 | 0 | 0 | 0 | 0 |
| desquamation of vascular | | | | | | | | | | | | | | | | |
| endothelial cells | | | | | | | | | | | | | | | | |
| Reactive inflammatory | | | | | | | | | | | | | | | | |
| patterns | | | | | | | | | | | | | | | | |
| Necrosuppurative | 0 | 0 | 0 | 0 | 0 | 0 | 0 | 0 | 0 | 0 | 0 | 0 | 0 | 0 | 0 | 0 |
| bronchitis | | | | | | | | | | | | | | | | |
| Bronchointerstitial | 0 | 0 | 0 | 0 | 0 | 0 | 0 | 0 | 0 | 0 | 0 | 0 | 0 | 0 | 0 | 0 |
| pneumonia | | | | | | | | | | | | | | | | |
| Interstitial pneumonia | 0 | 0 | 0 | 0 | 1 | 0 | 0 | 0 | 1 | 0 | 1 | 1 | 0 | 0 | 0 | 0 |
| Intraalveolar neutrophils | 0 | 0 | 0 | 0 | 2 | 0 | 2 | 1 | 2 | 1 | 1 | 1 | 0 | 0 | 2 | 2 |
| and macrophages | | | | | | | | | | | | | | | | |
| Lymphocytes | 1 | 0 | 0 | 1 | 1 | 1 | 1 | 1 | 2 | 1 | 1 | 1 | 0 | 0 | 2 | 2 |
| Polymorphonuclear | 1 | 0 | 0 | 1 | 1 | 1 | 1 | 1 | 1 | 1 | 1 | 1 | 0 | 0 | 1 | 1 |
| granulocytes (neutrophils, | | | | | | | | | | | | | | | | |
| heterophils) | | | | | | | | | | | | | | | | |
| Monocytes, macrophages | 0 | 0 | 0 | 0 | 2 | 0 | 1 | 1 | 1 | 1 | 1 | 1 | 1 | 1 | 2 | 2 |
| Perivascular lymphocytic | 0 | 0 | 0 | 0 | 1 | 1 | 1 | 1 | 2 | 2 | 1 | 1 | 0 | 0 | 2 | 2 |
| cuffing | | | | | | | | | | | | | | | | |
| Activation of mesothelial | 0 | 0 | 0 | 0 | 0 | 0 | 0 | 0 | 0 | 0 | 0 | 0 | 0 | 0 | 0 | 0 |
| cells | | | | | | | | | | | | | | | | |
| Regeneration and repair | | | | | | | | | | | | | | | | |
| Hyperplasia of BEC | 0 | 0 | 0 | 0 | 0 | 0 | 0 | 0 | 0 | 0 | 0 | 0 | 0 | 0 | 0 | 0 |
| Hyperplasia of AEC-II | 0 | 0 | 0 | 0 | 0 | 0 | 0 | 0 | 0 | 1 | 1 | 0 | 1 | 1 | 0 | 0 |
| Multinucleated or | 0 | 0 | 0 | 0 | 0 | 0 | 0 | 0 | 0 | 0 | 0 | 0 | 0 | 0 | 0 | 0 |
| otherwise atypical | | | | | | | | | | | | | | | | |
| epithelial cells | | | | | | | | | | | | | | | | |
| Pleural fibroblastic | 0 | 0 | 0 | 0 | 0 | 0 | 0 | 0 | 0 | 0 | 0 | 0 | 0 | 0 | 0 | 0 |
| proliferation/fibrosis | | | | | | | | | | | | | | | | |

[0490] In contrast, hamsters infected with wild-type SARS-COV-2 had pathology scores greater than 50% at the same time points. See Table 9 below for scores from individual animals.

TABLE 9

| Group | Wildtype Wuhan SARS-CoV-2 | | | | | | | | | | | | | | | |
|---|---|---|---|---|---|---|---|---|---|---|---|---|---|---|---|---|
| Day | Day 3 | | | | Day 5 | | | | Day 7 | | | | Day 14 | | | |
| Animal No | 1 | 2 | 3 | 4 | 5 | 6 | 7 | 8 | 9 | 10 | 11 | 12 | 13 | 14 | 15 | |
| Overall severity | | | | | | | | | | | | | | | | |
| % of lung area | 1 | 52 | 5 | 10 | 50 | 40 | 80 | 50 | 80 | 50 | 50 | 40 | 20 | 1 | 35 | 0 |
| affected | | | | | | | | | | | | | | | | |
| Mean | 10 | | | | 55 | | | | 55 | | | | 19 | | | |
| Distribution of | | | | | | | | | | | | | | | | |
| lesions | | | | | | | | | | | | | | | | |
| Bronchial and | 1 | 2 | 2 | 2 | 2 | 2 | 3 | 3 | 2 | 2 | 2 | 2 | 1 | 1 | 2 | 0 |
| peribronchial | | | | | | | | | | | | | | | | |
| Patchy throughout the | 0 | 2 | 1 | 1 | 3 | 3 | 4 | 3 | 3 | 3 | 3 | 3 | 2 | 1 | 3 | 0 |
| lungs | | | | | | | | | | | | | | | | |
| Cell and tissue | | | | | | | | | | | | | | | | |
| damage | | | | | | | | | | | | | | | | |
| Necrosis of BEC | 1 | 2 | 1 | 2 | 1 | 1 | 2 | 0 | 0 | 0 | 0 | 0 | 0 | 0 | 0 | 0 |
| Cellular debris in | 1 | 1 | 1 | 1 | 1 | 1 | 2 | 1 | 1 | 0 | 1 | 0 | 0 | 0 | 0 | 0 |
| bronchi | | | | | | | | | | | | | | | | |
| Diffuse alveolar | 0 | 2 | 1 | 1 | 3 | 3 | 4 | 3 | 3 | 3 | 3 | 3 | 2 | 1 | 3 | 0 |
| damage | | | | | | | | | | | | | | | | |
| Necrosis of AEC | 0 | 2 | 1 | 1 | 1 | 1 | 2 | 2 | 0 | 0 | 0 | 0 | 2 | 0 | 0 | 0 |
| Cellular debris in | 0 | 2 | 1 | 1 | 3 | 3 | 3 | 2 | 2 | 2 | 2 | 2 | 2 | 0 | 1 | 0 |
| alveoli | | | | | | | | | | | | | | | | |
| Alveolar emphysema | 0 | 2 | 1 | 1 | 1 | 1 | 3 | 2 | 1 | 1 | 1 | 3 | 2 | 0 | 1 | 0 |
| Circulatory changes | | | | | | | | | | | | | | | | |
| and vascular lesions | | | | | | | | | | | | | | | | |
| Alveolar hemorrhage | 0 | 2 | 1 | 1 | 2 | 2 | 3 | 2 | 1 | 1 | 1 | 2 | 1 | 0 | 1 | 0 |
| Alveolar edema | 0 | 1 | 1 | 1 | 1 | 3 | 3 | 2 | 1 | 1 | 1 | 1 | 1 | 0 | 1 | 0 |
| Perivascular/interstitial | 0 | 1 | 1 | 1 | 2 | 2 | 3 | 2 | 2 | 2 | 2 | 2 | 1 | 0 | 1 | 0 |
| edema | | | | | | | | | | | | | | | | |
| Vascular | 2 | 2 | 1 | 2 | 2 | 3 | 2 | 2 | 0 | 0 | 0 | 0 | 0 | 0 | 0 | 0 |
| endothelialitis | | | | | | | | | | | | | | | | |
| Necrosis and | 1 | 1 | 1 | 1 | 1 | 1 | 0 | 0 | 0 | 0 | 0 | 0 | 0 | 0 | 0 | 0 |
| desquamation of | | | | | | | | | | | | | | | | |
| vascular endothelial | | | | | | | | | | | | | | | | |
| cells | | | | | | | | | | | | | | | | |
| Reactive inflammatory | | | | | | | | | | | | | | | | |
| patterns | | | | | | | | | | | | | | | | |
| Necrosuppurative | 0 | 0 | 0 | 0 | 0 | 0 | 3 | 0 | 0 | 0 | 0 | 0 | 0 | 0 | 0 | 0 |
| bronchitis | | | | | | | | | | | | | | | | |
| Bronchointerstitial | 0 | 0 | 0 | 0 | 0 | 0 | 2 | 0 | 0 | 0 | 0 | 0 | 0 | 0 | 0 | 0 |
| pneumonia | | | | | | | | | | | | | | | | |
| Interstitial pneumonia | 0 | 0 | 0 | 0 | 0 | 0 | 0 | 0 | 0 | 0 | 0 | 0 | 0 | 0 | 0 | 0 |
| Intraalveolar | 0 | 2 | 1 | 2 | 2 | 2 | 3 | 2 | 2 | 2 | 2 | 2 | 2 | 1 | 1 | 0 |
| neutrophils and | | | | | | | | | | | | | | | | |
| macrophages | | | | | | | | | | | | | | | | |
| Lymphocytes | 1 | 2 | 1 | 2 | 2 | 2 | 2 | 2 | 2 | 2 | 2 | 2 | 2 | 1 | 1 | 0 |
| Polymorphonuclear | 1 | 2 | 1 | 2 | 1 | 1 | 2 | 1 | 1 | 1 | 1 | 1 | 1 | 0 | 1 | 0 |
| granulocytes | | | | | | | | | | | | | | | | |
| (neutrophils, | | | | | | | | | | | | | | | | |
| heterophils) | | | | | | | | | | | | | | | | |
| Monocytes, | 0 | 2 | 1 | 2 | 3 | 3 | 3 | 3 | 3 | 3 | 3 | 3 | 2 | 1 | 1 | 0 |
| macrophages | | | | | | | | | | | | | | | | |
| Perivascular | 1 | 2 | 1 | 1 | 2 | 2 | 2 | 2 | 2 | 2 | 2 | 2 | 1 | 1 | 1 | 0 |
| lymphocytic cuffing | | | | | | | | | | | | | | | | |
| Activation of | 0 | 0 | 0 | 0 | 0 | 0 | 0 | 0 | 0 | 0 | 0 | 0 | 0 | 0 | 0 | 0 |
| mesothelial cells | | | | | | | | | | | | | | | | |
| Regeneration and | | | | | | | | | | | | | | | | |
| repair | | | | | | | | | | | | | | | | |
| Hyperplasia of BEC | 0 | 0 | 0 | 0 | 3 | 1 | 3 | 2 | 2 | 2 | 2 | 2 | 0 | 0 | 3 | 0 |
| Hyperplasia of | 0 | 0 | 0 | 0 | 1 | 0 | 1 | 1 | 3 | 3 | 3 | 3 | 2 | 2 | 3 | 0 |
| AEC0II | | | | | | | | | | | | | | | | |
| Multinucleated or | 0 | 0 | 0 | 0 | 0 | 0 | 0 | 0 | 0 | 0 | 0 | 0 | 0 | 0 | 0 | 0 |
| otherwise atypical | | | | | | | | | | | | | | | | |
| epithelial cells | | | | | | | | | | | | | | | | |
| Pleural fibroblastic | 0 | 0 | 0 | 0 | 0 | 0 | 0 | 0 | 0 | 0 | 0 | 0 | 1 | 0 | 0 | 0 |
| proliferation/fibrosis | | | | | | | | | | | | | | | | |

[0491] For all the specific pathology readouts, such as cellular infiltration, tissue damage and epithelial hyperplasia, the scores for candidate 7N-1 were dramatically lower than for wild-type virus. Histopathological changes were observed in wildtype SARS-COV-2-infected groups with increase in severity of % lungs affected was observed on 7-day post infection (see FIG. 36). The % lungs affected was lower in 7N-1 on Day 7 post infection (see FIG. 36). The results clearly demonstrate the safety of the vaccine in the hamster model. Hamster and human ACE2 are nearly identical, with only four amino acid differences, suggesting that these results are likely to provide a good model for human infection and vaccination with 7N-1.

### Candidate 7N-1 Vaccine Induces Strong Neutralizing Antibodies in Hamsters.

[0492] The route of live attenuated vaccine immunisation in humans is subcutaneous. Therefore, we determined the immunogenicity of the vaccine in hamsters when given subcutaneously. To assess immunogenicity, hamsters were immunised subcutaneously with 10⁴ PFU candidate 7N-1. Serum samples were collected two weeks later to measure PRNT₅₀ (50% of virus neutralized), PRNT₉₀ (90% of virus neutralized) and PRNT₁₀₀ (100% of virus neutralized) neutralising antibody titers (see Table 7 of an earlier Example). The neutralising antibody titers elicited by immunisation with candidate 7N-1 were very high, demonstrating the vaccine's strong immunogenicity.

### Example 18—Rational Design of Vaccine Candidates

[0493] We designed, constructed and tested various attenuated COVID-19 vaccine candidates using codon de-optimisation (CD) of the ORF1a region of the genome, from SanD1¹⁵³⁴ to PacI⁸⁵⁸⁶, which we call the deoptimised region—‘DO region’. Various combinations of CD fragments 1-3 were used to generate the candidates: Fragment 1: SanD1¹⁵³⁴ to SmaI⁴²⁵⁴; Fragment 2: SmaI⁴²⁵⁴ to AvrII⁶⁹⁸²; and, Fragment 3:AvrII⁶⁹⁸² to PacI⁸⁵⁸⁶. Fragment 3 is the shortest fragment. The numbers 1534, 8586 etc. indicate the genomic positions of the Wuhan strain. The codon changes per fragment and for the DO region are summarised in Table 10 below.

TABLE 10

| Group | Fragment 1 | Fragment 2 | Fragment 3 | Entire DO region |
|---|---|---|---|---|
| 77 | Ser: 24 | Ser: 28 | Ser: 25 | Ser: 24, Ser: 28, Ser: 25, |
| group | | | | total 77 |

77 group - Targeting most rare codon: 50% serine
(did not target Arg): 77-1 (fragment 3), 77-2
(fragment 2), 77-3 (fragment 1), 77-4 (fragments 1&2),
77-5 (fragments 1&3), 77-6 (fragments
2&3), 77-7 (fragments 1-3).
All vaccine candidates were rescued.

| | | | | |
|---|---|---|---|---|
| 160 | Ser: 48 | Ser: 59 | Ser: 53 | Ser: 48, Ser: 59, Ser: 53, |
| group | | | | total 160 |

160 group - Targeting most rare codon: 100% serine
(did not target Arg): 160-1 (fragment 3), 160-2
(fragment 2), 160-3 (fragment 1), 160-4 (fragments 1&2),
160-5 (fragments 1&3), 160-6 (fragments
2&3), 160-7 (fragments 1-3).
All vaccine candidates were rescued.

| | | | | |
|---|---|---|---|---|
| 4N | I: 39, P: 32, T: 67, | I: 24, P: 39, | I: 19, P: 10, T: 34, | I: 82, P: 81, T: 186, A: 147, |
| group | A: 62 | T: 85, A: 51 | A: 34 | total 496 |

4N group - Targeting second rare codon: IPTA (did not
target Leu, Val): 4N-1 (fragment 3) was
rescued. The following were not rescued/were dead
clones: 4N-2 (fragment 2), 4N-3 (fragment 1),
4N-4 (fragments 1&2), 4N-5 (fragments 1&3),
4N-6 (fragments 2&3), 4N-7 (fragments 1-3).

| | | | | |
|---|---|---|---|---|
| 7N | I: 40, P: 33, T: 68, | I: 4, P: 39, T: 77, | I: 0, P: 10, T: 33, | I: 44, P: 82, T: 178, A: 147, |
| group | A: 62, R: 11, G: 21, | A: 51, R: 18, | A: 34, R: 11, G: 8, | R: 40, G: 41, Q: 14, |
| | Q: 9 | G: 12, Q: 4 | Q: 1 | total 546 |

7N group - Targeting most rare codon (ARG), second
rare codon (Pro, Thr, Ala; did not target Leu,
Val) and not rare codons (Gly, Gln): 7N-1
(fragment 3) was rescued. The following were not
rescued/were dead clones: 7N-2 (fragment 2), 7N-3
(fragment 1), 7N-4 (fragments 1&2), 7N-5
(fragments 1&3), 7N-6 (fragments 2&3), 7N-7 (fragments 1-3).

[0494] For the entire SanD1¹⁵³⁴ to PacI⁸⁵⁸⁶ genomic DO region. Table 11 below covers all of the amino acids (‘Aa’) throughout the entire DO region. Note, this table is looking at the entire DO region; all the numbers are for codons, rather than nucleotides.

TABLE 11

| | | | | | | Column #7 |
|---|---|---|---|---|---|---|
| | | | | | Column #6 | Aa number |
| | | | | | Number of | of other |
| | Column #2 | | | Column #5 | rare codons | codons |
| | Rare codon | Column #3 | Column #4 | Number of | for each | (maximum |
| Column #1 | for amino | Codon | Frequency of | amino acids | amino acid | codon |
| Amino | acid (target | fraction in | codon in | in DO | in the DO | change |
| acid | codon) | humans | humans (%) | region | region | number) |
| Ser | TCG | 0.05 | 4.4 (1^{st} group) | 162 | 2 | 160 |
| Arg | CGT | 0.08 | 4.54 (1^{st} group) | 54 | 11 | 43 |
| Thr | ACG | 0.11 | 6.14 (2^{nd} group) | 193 | 6 | 187 |
| Pro | CCG | 0.11 | 6.9 (2^{nd} group) | 85 | 3 | 82 |
| Val | GTA | 0.12 | 7.1 (2^{nd} group) | 200 | 35 | 165 |
| Leu | CTA | 0.07 | 7.2 (2^{nd} group) | 224 | 25 | 199 |
| Ala | GCG | 0.11 | 7.4 (2^{nd} group) | 156 | 9 | 147 |
| Ile | ATA | 0.17 | 7.5 (2^{nd} group) | 128 | 41 | 87 |
| Cys | TGT | 0.46 | 10.6 (3rd group) | 60 | 54 | 6 |
| Gly | GGT | 0.16 | 10.8 (3rd group) | 128 | 87 | 41 |
| His | CAT | 0.42 | 10.9 (3rd group) | 37 | 24 | 13 |
| Tyr | TAT | 0.44 | 12.2 (3rd group) | 102 | 59 | 43 |
| Gln | CAA | 0.27 | 12.3 (3rd group) | 81 | 53 | 28 |
| Trp | TGG | 1 | 13.2 (3rd group) | 24 | 24 | 0 |
| Asn | AAT | 0.47 | 17 (4th group) | 134 | 96 | 38 |
| Phe | TTT | 0.46 | 17.6 (4th group) | 98 | 76 | 22 |
| Asp | GAT | 0.46 | 21.8 (4th group) | 114 | 75 | 39 |
| Met | ATG | 1 | 22 (4th group) | 44 | 44 | 0 |
| Lys | AAA | 0.43 | 24.4 (4th group) | 176 | 120 | 56 |
| Glu | GAA | 0.42 | 29 (4th group) | 153 | 112 | 41 |

| | | | | | Column #13 |
|---|---|---|---|---|---|
| | Column #9 | | Column #11 | Column #12 | Predicted |
| Column #8 | Minimum | Column #10 | Maximum | Predicted | useful |
| Minimum | Aa codon | Maximum | Aa codon | useful number | percentage |
| Aa codon | change | Aa codon | change | of Aa codon | of Aa codon |
| change | percentage | change | percentage | changes | changes |
| number in | in our | number in | in our | in the DO | in the DO |
| our design | design | our design | design | region | region |
| 24 | 15% | 160 | 100% | 0 to 160 | 0-100% |
| 11 | 26% | 40 | 93% | 0 to 43 | 0-100% |
| 33 | 18% | 186 | 99% | 0 to 187 | 0-100% |
| 10 | 12% | 82 | 100% | 0 to 82 | 0-100% |
| / | / | / | / | 0 to 165 | 0-100% |
| / | / | / | / | 0 to 199 | 0-100% |
| 34 | 23% | 147 | 100% | 0 to 147 | 0-100% |
| 0 | 0% | 82 | 94% | 0 to 87 | 0-100% |
| / | / | / | / | 0 to 6 | 0-100% |
| 8 | 20% | 41 | 100% | 0 to 41 | 0-100% |
| / | / | / | / | 0 to 13 | 0-100% |
| / | / | / | / | 0 to 43 | 0-100% |
| 1 | 4% | 14 | 50% | 0 to 28 | 0-100% |
| / | / | / | / | 0 | 0%, no need |
| / | / | / | / | 0 to 38 | 0-100% |
| / | / | / | / | 0 to 22 | 0-100% |
| / | / | / | / | 0 to 39 | 0-100% |
| / | / | / | / | 0 | 0%, no need |
| / | / | / | / | 0 to 56 | 0-100% |
| / | / | / | / | 0 to 41 | 0-100% |

Column #3: Codon fraction in certain Aa. For example, Ser has 6 synonymous codons: AGT, AGC, TCG, TCA, TCT, TCC. The number of TCG in all the 6 Ser codons is 5%. This number is a reflection of rarity of the codon within one particular Aa.
Column #4: Codon frequency in human genome. This is different from Column #3 which is the fraction of the codon. Codon frequency is not only a reflection of the rarity of the codon, but also the rarity of the Aa. We hypothesise that the codon frequency is more suitable than codon fraction, as we want to slow down viral translation.
Column #5: The Aa number in the entire DO region. It is also the total codon number for certain Aa. For instance, there are 162 Ser in our DO region (SanD1¹⁵³⁴ to PacI⁸⁵⁸⁶). There are total 162 Ser codons.
Column #6: The number of rare codons for each Aa in the DO region. For instance, TCG is the rare codon of Ser. There are 2 Ser rare codons (TCG) in our DO region, which means we cannot change these 2 codons.
Column #7: The maximum mutation number that we can make for each Aa in the DO region. 162 − 2 = 160, we can change/deoptimize at most 160 Ser codons to its rare codon (TCG).
Column #8: In all our DO region designs, there is one having the least numbers of changes of a certain Aa. In the case of Ser, 77-3 targeting sub-fragment 1 is the design having least mutations of Ser (24). In other words, in our designs targeting Ser, we used at least 24 changes. Therefore, the number could be considered the minimum number of codon changes supported by our experiment.
Column #9: The percentage of the change number (Column #8) in the maximum change we could make (Column #7). 24/160 = 15%, we changed at least 15% of Ser in our designs.
Column #10: In all our designs, there is one having the most numbers of changes of an Aa. In the case of Ser, 160-7 targeting the entire region is the design having most mutations of Ser (160). In other words, in our designs targeting Ser, we used at most 160 changes. Therefore, the number could be considered the maximum number of codon changes supported by our experiment.
Column #11: The percentage of the change number (Column #10) in the maximum change we could make (Column #7). 160/160 = 100%, we changed at most 100% of Ser in our designs.
Column #12 and #13 are our estimation of the Aa changes (by number and percentage) which should result in potentially rescuable and efficacious vaccine candidates/clones.

[0495] Although we do not have experimental data for each and every amino acid change in Table 11, it is reasonable to expect that the stated percentage and number of codon changes within the DO region will result in potentially rescuable and efficacious vaccine candidates/clones. Codon frequency can be divided into 4 groups: under 5% (1^{st} group), 5-10% (2^{nd} group), 10-15% (3^{rd} group), over 15% (4^{th} group). See the group numbering in Column #4. We have experimental data representing codon changes for the first 3 groups, and the percentage of the codon change in our designs is quite wide (see Column #9 and #11). However, we do not have experimental data for the 4^{th} group (frequency over 15%), but we believe that the number and percentage of codon changes is reasonable and should result in potentially rescuable and efficacious vaccine candidates/clones. Our reasons are: Ser and Arg are representative for the Aa that have rare codons (frequency under 5%); Thr, Pro, Ala and Ile are representative for the Aa that have less rare codons (frequency 5-10%); and, Gly and Gln are representative for the Aa that don't have rare codons (frequency 10-15%). We do not have experimental data to support the coverage of the Aa with codon frequency over 15%. Asn, Phe, Asp, Lys and Glu. We probably do not need to cover those Aa, as the frequency of these Aa is very high (we want to de-optimize, not optimize). Met and Trp have only one synonymous codon and cannot be changed.

### Example 19—Mouse Model Testing of Vaccine Candidates

[0496] Further testing of vaccine candidates can be carried out as depicted in FIG. 6. Live attenuated SARS-COV-2 vaccine candidates can be tested in a mouse model of SARS-CoV infection using human ACE2 receptor transgenic mice. Antibody and cellular responses can be determined in immunised mice. Mice can be followed for a period of 2 weeks after immunisation. Body weight can be observed for 7 days. Virus load in the lung and nasal turbinate can be measured on day 2 and day 4 post-immunisation. Anti-SARS-COV-2 specific antibody levels (total IgG, IgM) and neutralisation titres can also be measured in the sera on various days post-immunisation. T cell immune responses can be examined on day 7 and day 14 post-immunisation. We can also evaluate vaccine efficacy by a challenge with a wild type SARS-COV-2. Immunised mice can be challenged 4 weeks after immunisation. Body weight can be observed in all groups. Challenged mice can be followed for a period of 2 weeks post-challenge. Viral titres can be measured in the lung and nasal turbinate on day 2 and day 4 post-post-challenge. Antibody titres (IgG, IgM) and neutralisation titres can be measured in the sera on specific days post-challenge. Histological analysis of lung tissue can be performed on day 2 and day 4 post-post-challenge. T cell responses can be examined at specific on day 7 and day 14 post-challenge.

### Example 20—Macaque Model Testing of Vaccine Candidates

[0497] Live attenuated SARS-COV-2 vaccine candidates can be further tested in the NHP model of SARS-COV 2 infection. Antibody and cellular responses can be determined in immunised macaque. Viremia in the sera, lung and/or nasal/oral secretions can be measured. Anti-SARS-COV-2 specific antibody levels, neutralisation titres and cellular immune response can be measured post-immunisation. We can also evaluate vaccine efficacy by a challenge with a wild type SARS-COV-2. Immunised macaque can be challenged several weeks after immunisation. Clinical symptoms can be observed in all groups. Viral titres can be measured in the sera, lung and/or nasal/oral secretions post-challenge. Antibody titres, neutralisation titres and cellular immune response can be measured post-challenge. Histological analysis of lung tissue can be performed post-challenge.

[0498] Total of five groups (each group can have five animals each). Total animals: 25.
[0499] Group 1 (N=5) Dose strength 1 Challenge on week 4 or week 9.
[0500] Group 2 (N=5) Dose strength 1, Booster on week 8, Challenge on week 9/10.
[0501] Group 3 (N=5) Dose strength 2 Challenge on Week 4 or week 9.
[0502] Group 4 (N=5) Dose strength 2, Booster on week 8, Challenge on week 9/10.
[0503] Group 5 (N=5) Challenge on week 4 or week 9.

[0504] The Nab titer (neutralizing antibodies) and the S-specific binding antibodies can be evaluated before challenge to determine vaccination efficacy. If it is too early to challenge at week 4 as the immune response after vaccination may be slow/delayed, challenge in week 9 can be undertaken.

[0505] Various viral and immune parameters can be measured as described in FIG. 5.

### Example 21—Evaluation of Safety and Efficacy of Vaccine Candidate 7N-1 Against SARS-COV-2 in Cynomolgus Macaques

[0506] This Example briefly describes a study for evaluating the safety, the degree of immune response and the efficacy of vaccine candidate 7N-1 in the cynomolgus non-human primate (NHP) model after one or two immunizations.

### Protocol

[0507] The protocol is summarised in Table 12 below.

TABLE 12

| | | | | | Route, | | |
|---|---|---|---|---|---|---|---|
| | | | | Vaccine | volume, | Immunization | Challenge, |
| Groups | | n= | Species | (dose) | site | schedule | route, volume |
| 1 | Vaccinated | 5 | Cynomolgus | 7N-1 (10⁴ | s.c., 0.5 | 1 immunization | SARS-CoV-2 |
| | (prime | | macaques | PFU) | mL, | at w 0 | P1 variant |
| | only) | | | | right thigh | | i.n. (0.25 mL |
| 2 | Vaccinated | 5 | | 7N-1 (10⁴ | | 2 immunizations | per nostril) + |
| | (prime + | | | PFU) | | at w 0 and w 4 | i.t. (4.5 mL) at |
| | boost) | | | | | | week 8 post |
| 3 | Control | 5 | | DPBS | | 2 DPBS placebo | first |
| | | | | | | shot at w 0 and | immunization |
| | | | | | | w 4 | |

Experimental groups. (s.c: subcutaneous; i.n.: intranasal; i.t.: intratracheal)

[0508] As described in Table 12, fifteen cynomolgus macaques are included in this study and divided into 3 groups. Animals of groups 1 and 2 will be immunized with the 7N-1 vaccine (10⁴ PFU) by subcutaneous (s.c.) route. Animals from group 1 (n=5) will receive only one dose of the vaccine on day 0 and a placebo dose on week 4. The animals of group 2 (n=5) will be immunized both on day 0 while animals in group 2 will receive a prime and a boost on days 0 and 28 (4 weeks). Animals of control group (n=5) will receive the vehicle as placebo by s.c. route on day 0 and day 28.

[0509] All animals will then be exposed at week 8 post first immunization to SARS-COV-2 P1 variant (Brazilian strain) by intranasal (i.n.) and intratracheal (i.t.) routes simultaneously, with a 1.105 TCID50 challenge dose. Animals will be euthanized at day 14 post challenge. Samples will be collected and analyzed.

### Vaccine

[0510] The 7N-1 vaccine is a highly-purified, whole virus, SARS-COV-2 vaccine produced on Vero cells and attenuated by codon de-optimisation technology to make multiple mutations in the non-structural proteins of SARS-COV-2.

[0511] The composition of the vaccine (0.5 mL) is shown in Table 13.

TABLE 13

| | |
|---|---|
| Attenuated Wuhan | Antigen |
| SARS-CoV-2 | Units/dose): |

Active substance

10⁴ PFU

Excipients and buffer components
Dulbecco's Phosphate Buffered Saline (DPBS)/Tris Buffered Saline.
DPBS composition: 200 mg/L KCl (2.68 mM), 200 mg/L KH₂PO₄ (1.47 mM), 8000 mg/L NaCl (136.9 mM), 2160 mg/L Na₂HPO₄*7H₂O (8.06 mM); Tris buffered saline: 20 mM Tris, 100 mM NaCl, pH 7.5.

### SARS-COV-2 Virus

[0512] SARS-COV-2 P1 variant virus doses will be purchased from BEI Resources Repository (National Instituted of Health, USA).
[0513] Strain: SARS-COV-2, hCoV-19/Japan/TY7-503/2021 (P1)
[0514] Passage: 2
[0515] Sequence: Compared to the initial isolate, the following mutations are present: Spike D138Y, Spike D614G, Spike E484K, Spike H655Y, Spike K417T, Spike L18F, Spike N501Y, Spike P26S, Spike R190S, Spike T20N, Spike T1027I, Spike V1176F, N (Nucleocapsid protein) G204R, N P80R, N R203K, NSP3 (Non-structural protein 3) S253P, NSP8 (Non-structural protein 8) E92K, NSP3 K977Q, NSP3 S370L, NSP6 (Non-structural protein 6) F108del, NSP6 F184V, NSP6 G107del, NSP6 S106del, NSP12 (Non-structural protein 12) P323L, NSP13 (Non-structural protein 13) E341D, NSP6 (Non-structural protein 6) F184V. The full sequence was published and can be found online (SAMN18527803).
[0516] Titer: 4.42. 106 TCID50/mL
[0517] Volume/aliquot: 1 mL
[0518] produced on Calu-3 cells

### Preparation of the Vaccine

[0519] The vaccine will be provided in two formulations—liquid form and freeze-dried form. For the liquid form, the vaccine will be provided in vials containing 1 mL of attenuated SARS-COV-2 strain 7N-1. For the freeze-dried form, the vaccine will be provided in vials containing lyophilized powder of attenuated SARS-COV-2 strain 7N-1. The vaccine will be stored in a freezer at −80° C. SARS-Cov-2 virus strain 7N-1 (1×10⁵ PFU/ml/Vial). Freeze dried SARS-Cov-2 virus strain 7N-1 (1×10⁵ PFU/Vial).

### Example 22—Protocol for Rescue of SARS-COV-2 Virus from Full Length Constructs

[0520] This Example describes a protocol for successfully transfecting vaccine constructs, being an alternative to the method described in Example 8. We are able to rescue candidate viruses by directly transfecting Vero GMP cells without the need to use BHK cells.

### 1. Application

[0521] To rescue a recombinant SARS COV-2 virus from a full-length DNA infectious clone(s).

### 2. Materials Required

[0522] Nuclease free tips, Nuclease free tubes, Cell culture incubator, Nanodrop instrument, Microfuge, 12 well tissue culture plate, Light microscope, Sterile 1.5 mL Eppendorf tubes, SARS-COV-2 infectious clone plasmid(s), Vero-GMP cells, HEK-293 TT cells, BHK-21 cells, Vero E6 cells, Lipofectamine 2000 reagent (Thermo Fisher Scientific-11668019), Polyethyleneimine MAX (Polysciences Inc, 24765), Opti-MEM medium, HMEM, DMEM growth medium, and Fetal bovine serum.

### 3. Procedure

### Day 0—Plating Cells

[0523] Seed the cells at a recommended seed rate following Table 14 below.

TABLE 14

| Cells | Seeding density | Medium used |
|---|---|---|
| Vero-GMP | 2 × 10⁵ cells per/ml | HMEM with 10% FBS |
| Vero-E6 | 3 × 10⁵ cells per/ml | HMEM with 10% FBS |
| BHK-21 | 3 × 10⁵ cells per/ml | HMEM with 10% FBS |
| HEK-293 | 4 × 10⁵ cells per/ml | DMEM with 10% FBS |

[0524] Incubate the plates at 37° C. with 5% CO₂ overnight or until the monolayer reaches to 70-80% confluency.

### Day 1—Transfection

[0525] Prepare the transfection reagent and the DNA as provided in Table 15 below.

TABLE 15

| | Vial A | | | | |
|---|---|---|---|---|---|
| | | Volume | Vial B | | |
| | Volume of | (Lipofectamine | Volume of | Volume of | |
| Plate | OptiMEM | or PEI MAX) | OptiMEM | (DNA) | Ratio |
| 12 well | 100 μl | 6 μl | 100 μl | 2 μg | 1:3 |

[0526] Wait for 5 minutes at room temperature.

[0527] Mix the transfection reagent (Vial A) and DNA (Vial B) and incubate at room temperature for 20 minutes.

[0528] Transfer the lipofectamine/PEI MAX and DNA complex into the cells.

[0529] Gently mix and incubate the plates at 37° C. at 5% CO₂ up to 72-96 hours and observe the plates for every 12-24 hours.

[0530] After incubation, harvest the contents of the wells in to 15 ml centrifuge tube.

[0531] Freeze the tubes in −80° C. and quickly thaw the tubes in a 25° C. water bath. Repeat this step twice and clarify the sample by centrifugation at 1500 rpm for 10 minutes and store at −80° C. until further process.

### Day 5—Day 7-Passage of the Rescued Clone (Blind Passage-I)

### Day 5—Seeding Plates

[0532] Seed Vero-GMP cells at 3×10⁵ cells per/ml in a 12 well plate and incubate the plates at 37° C. at 5% CO₂.

### Day 6—Day 9—Propagation and Harvest

[0533] Infect the Vero-GMP monolayer (1 ml/well in 12 well plate) with the clarified transfected supernatant.

[0534] Incubate the plates at 37° C. at 5% CO₂ overnight (˜16 hours).

[0535] After incubation, replace the medium with fresh HMEM supplemented with 1% FBS and continue incubating the plates at 37° C. at 5% CO₂ for 60 hours.

[0536] After incubation, harvest the virus (supernatant and cells) and store at −80° C. until further process.

[0537] Propagation of the rescued virus (Blind passage-II)

[0538] If required (if the CPE is not evident), repeat the passage once again in Vero-GMP cells as described above before further scale up.

[0539] Titrate the virus following standard protocol.

[0540] Scale up the virus as required at a preferred MOI.

### Example 23—Vaccine Candidate 7N-1 Provides Full Protection from Rechallenge Mortality when Given Via Intranasal Route in HFH4-hACE2 Mice

[0541] To test the efficacy of candidate 7N-1 as a COVID-19 vaccine, we established a challenge experiment using the following immunisation groups: 10³ PFU 7N-1 intranasal; 10⁵ PFU 7N-1 subcutaneous; 10³ PFU wild-type mouse-adapted SARS-COV-2 (SARS-COV-2 MA10) intranasal; and unimmunised (PBS treated). See FIG. 37A-F.

[0542] HFH4-hACE2 mice were used in this study. Three weeks later, the mice were challenged with 10⁵ PFU intranasal wild-type mouse-adapted SARS-COV-2 (SARS-COV-2 MA10) and monitored over a 7-day period. All mice in the unvaccinated group were moribund by day 7 post-infection and were euthanised. Mice given 7N-1 vaccination showed strong protection from SARS-COV-2 challenge, with 100% survival in the intranasal group and 80% survival in the subcutaneous group (death in mice given 7N-1 subcutaneous is likely related to the reduced receptor expression in the periphery). Immunisation with wild-type mouse-adapted SARS-COV-2 (SARS-COV-2 MA10) provided partial protection.

### Example 24—Form of the Vaccine and Immunisation Protocol

[0543] Live attenuated SARS-COV-2 vaccine/vaccine dose can comprise freeze-dried/lyophilized infectious virus as produced in the earlier Examples. The freeze-dried/lyophilized infectious virus can be reconstituted and administered by subcutaneous injection, inhalation or oral route. In preferred embodiments, the vaccine is administered by subcutaneous injection, intranasally or orally. The vaccine can be used for prophylactic, active, single-dose immunization against SARS-COV-2 in humans. A subject may be administered, for example, a titre of approximately 10⁴ PFU attenuated virus per vaccine dose.

[0544] There are a number of key features of the codon-deoptimized SARS-COV-2 vaccine that make it very attractive as a commercial candidate.
[0545] 1) There are no licensed vaccines available for SARS-COV-2.
[0546] 2) The vaccine is a live attenuated vaccine, which generally delivers more potent immunity and longer protection from infection than other vaccine formulations such as subunit vaccines. It has also no adverse effect due to anti-vector immunity that will likely be problem for adenovirus-based vaccines, especially if annual re-vaccination is needed.
[0547] 2) The vaccine is expected to replicate to very low levels in mammalian cells but still induces potent immunity.
[0548] 3) We have achieved attenuation of the vaccine through targeted mutation of the region encoding for non-structural proteins (ORF1a region). We have introduced a number of silent mutations, which are expected to interfere with replication of the vaccine construct but have no effect on the structure of encoded proteins. By engineering multiple mutations into the vaccine, there is essentially no chance that the vaccine will revert to virulence. This is a crucial aspect of our vaccine design since safety of live attenuated vaccines is the major concern in bringing these types of vaccine to market. In contrast, vaccines based on a single attenuating mutation are highly susceptible to reversion and have considerable safety issues.
[0549] 4) The vaccine is expected to provide cross-protection against other coronaviruses e.g. SARS-COV-1 and MERS-COV.
[0550] 5) Other vaccine formulations are currently under development in other labs around the world (e.g. subunit vaccine, inactivate whole virus vaccine, recombinant virus vaccine, various RNA and DNA vaccines). Our approach involves the application of codon deoptimization technology to ORF1a to develop an attenuated vaccine.

[0551] Unless defined otherwise, all technical and scientific terms used herein have the same meaning as commonly understood by one of ordinary skill in the art to which this invention belongs. Although any methods and materials similar or equivalent to those described herein can also be used in the practice or testing of the present invention.

[0552] In the present specification and claims (if any), the word ‘comprising’ and its derivatives including ‘comprises’ and ‘comprise’ include each of the stated integers but does not exclude the inclusion of one or more further integers.

[0553] The reference to any prior art in this specification is not, and should not be taken as an acknowledgement or any form of suggestion that the prior art forms part of the common general knowledge.

1. A live attenuated-severe acute respiratory syndrome coronavirus 2 (SARS-CoV-2), SARS-COV-2, SARS-COV-2 particle or SARS-COV-2 nucleic acid comprising a partly codon deoptimized SARS-COV-2 genome.

2. A recombinant, isolated or substantially purified nucleic acid comprising a partly codon deoptimized SARS-COV-2 genome or partly codon deoptimized region thereof.

3. A vector, plasmid or genetic construct comprising the nucleic acid of claim 2.

4. A cell or isolate containing the live attenuated SARS-COV-2, SARS-COV-2, SARS-COV-2 particle, or SARS-COV-2 nucleic acid of claim 1.

5. An immunogenic composition, pharmaceutical preparation or vaccine comprising the live attenuated SARS-COV-2, SARS-COV-2, SARS-COV-2 particle or SARS-COV-2 nucleic acid of claim 1.

6. (canceled)

7. (canceled)

8. A method of: (1) vaccinating a subject; (2) prophylactically immunizing a subject against SARS-COV-2 or SARS-COV-2-like virus; (3) preventing a subject from contracting a SARS-COV-2 infection naturally or a SARS-COV-2-like infection naturally; (4) reducing the severity of a natural SARS-COV-2 disease or natural SARS-COV-2-like disease in a subject; (5) treating a subject having a natural SARS-CoV-2 infection or natural SARS-COV-2-like infection; or (6) eliciting an immune response in a subject, said method comprising the step of administering to the subject: a live attenuated SARS-COV-2, SARS-COV-2, SARS-COV-2 particle or SARS-CoV-2 nucleic acid comprising a partly codon deoptimized SARS-COV-2 genome; a recombinant, isolated or substantially purified nucleic acid comprising a partly codon deoptimized SARS-COV-2 genome or partly codon deoptimized region thereof; a vector, plasmid or genetic construct comprising the recombinant, isolated or substantially purified nucleic acid; a cell or isolate containing the live attenuated SARS-COV-2, SARS-COV-2, SARS-COV-2 particle or SARS-COV-2 nucleic acid; or the immunogenic composition, pharmaceutical preparation or vaccine of claim 5.

9. (canceled)

10. (canceled)

11. A method of generating a live attenuated SARS-COV-2 vaccine, SARS-CoV-2, SARS-COV-2 particle or SARS-COV-2 nucleic acid, or recombinant, isolated or substantially purified nucleic acid comprising a partly codon deoptimized SARS-COV-2 genome or partly codon deoptimized region thereof, comprising the step of partly codon deoptimizing a SARS-COV-2 genome.

12. The method of claim 11, further comprising the step of enabling the partly codon deoptimized live attenuated SARS-COV-2 to replicate.

13. The method of claim 12, further comprising the step of preparing a vaccine dose containing the replicated SARS-COV-2.

14. The live attenuated SARS-COV-2, SARS-COV-2, SARS-COV-2 particle or SARS-COV-2 nucleic acid of claim 1,
wherein the partly codon deoptimized SARS-COV-2 genome comprises or consists of codon changes within the ORF1a region of SARS-COV-2.

15. The live attenuated SARS-COV-2, SARS-COV-2, SARS-COV-2 particle or SARS-COV-2 nucleic acid of claim 14,
wherein the partly codon deoptimized SARS-COV-2 genome comprises or consists of codon changes within the ORF1a region of SARS-COV-2, excluding the 5′ region of ORF1 and/or excluding the 3′ region of ORF1a corresponding to the ribosomal frameshift region; or
wherein the partly codon deoptimized SARS-COV-2 genome comprises or consists of codon changes within the ORF1a region of SARS-COV-2 corresponding to between about nucleotide position 1534 and about nucleotide position 8586 of the wild-type Wuhan SARS-COV-2 genome.

16. The live attenuated SARS-COV-2, SARS-COV-2, SARS-COV-2 particle or SARS-COV-2 nucleic acid of claim 14,
wherein the partly codon deoptimized SARS-COV-2 genome comprises or consists of codon changes within the ORF1a region of SARS-COV-2 corresponding to:
(1) between about nucleotide position 1534 and about nucleotide position 4254 of the wild-type Wuhan SARS-COV-2 genome;
(2) between about nucleotide position 4254 and about nucleotide position 6982 of the wild-type Wuhan SARS-COV-2 genome;
(3) between about nucleotide position 6982 and about nucleotide position 8586 of the wild-type Wuhan SARS-COV-2 genome;
(4) between about nucleotide position 8586 and about nucleotide position 11165 of the wild-type Wuhan SARS-COV-2 genome;
(5) between about nucleotide position 11165 and about nucleotide position 12718 of the wild-type Wuhan SARS-COV-2 genome; or
(6) any combination of (1) to (5).

17. The live attenuated SARS-COV-2, SARS-COV-2, SARS-COV-2 particle or SARS-COV-2 nucleic acid of claim 14,
wherein the partly codon deoptimized SARS-COV-2 genome comprises or consists of between about 10 and about 1850 codon changes within the ORF1a region; or
wherein the partly codon deoptimized SARS-COV-2 genome comprises or consists of between about 24 and about 546 codon changes within the ORF1a region.

18. The live attenuated SARS-COV-2, SARS-COV-2, SARS-COV-2 particle or SARS-COV-2 nucleic acid of claim 14,
wherein the partly codon deoptimized SARS-COV-2 genome comprises or consists of codon changes to synonymous codons that are used less frequently, moderately, less rarely, and/or rarely in the genome of Homo sapiens; or
wherein the partly codon deoptimized SARS-COV-2 genome comprises or consists of
codon changes to one or more rare codons, one or more less rare codons, one or more moderate codons, one or more codons containing CG (CpG) dinucleotides, one or more codons containing UA (UpA) dinucleotides, or any combination thereof.

19. The live attenuated SARS-COV-2, SARS-COV-2, SARS-COV-2 particle or SARS-COV-2 nucleic acid of claim 14,
wherein the partly codon deoptimized SARS-COV-2 genome comprises or consists of synonymous codon changes whereby one or more Ser codons are changed, one or more Arg codons are changed, one or more Thr codons are changed, one or more Pro codons are changed, one or more Val codons are changed, one or more Leu codons are changed, one or more Ala codons are changed, one or more Ile codons are changed, one or more Cys codons are changed, one or more Gly codons are changed, one or more His codons are changed, one or more Gln codons are changed, one or more Trp codons are changed, one or more Asn codons are changed, one or more Phe codons are changed, one or more Asp codons are changed, one or more Phe codons are changed, one or more Lys codons are changed, one or more Glu codons are changed, or any combination thereof.

20. The live attenuated SARS-COV-2, SARS-COV-2, SARS-COV-2 particle or SARS-COV-2 nucleic acid of claim 14,
wherein the partly codon deoptimized SARS-COV-2 genome comprises or consists of synonymous codon changes whereby:
one or more Ser codons are changed to the rare TCG codon;
one or more proline codons are changed to the less rare CCG codon;
one or more threonine codons are changed to the less rare ACG codon;
one or more isoleucine codons are changed to the less rare ATA codon;
one or more alanine codons are changed to the less rare GCG codon; and/or
one or more arginine codons are changed to the rare CGT codon or less rare CGA codon.

21. The live attenuated SARS-COV-2, SARS-COV-2, SARS-COV-2 particle or SARS-COV-2 nucleic acid of claim 14,
wherein the partly codon deoptimized SARS-COV-2 genome comprises or consists of codon changes within the ORF1a region of SARS-COV-2 comprising:
a deoptimized nucleotide sequence as shown or substantially as shown in any one of SEQ ID NO:33-37;
a deoptimized nucleotide sequence as shown or substantially as shown in any one of SEQ ID NO:39-68;
a deoptimized nucleotide sequence as shown or substantially as shown in any one of
FIGS. 22 to 25;
a deoptimized nucleotide sequence as shown in any one of SEQ ID NO:33-37 but with up to 10% fewer or up to 10% more codon changes than shown;
a deoptimized nucleotide sequence as shown in any one of SEQ ID NO:39-68 but with up to 10% fewer or up to 10% more codon changes than shown; or
a deoptimized nucleotide sequence as shown in any one of FIGS. 22 to 25 but with up to 10% fewer or up to 10% more codon changes than shown.

22. The live attenuated SARS-COV-2, SARS-COV-2, SARS-COV-2 particle or SARS-COV-2 nucleic acid of claim 14,
wherein the partly codon deoptimized SARS-COV-2 genome comprises or consists of codon changes as listed in Table 1b, either individually or in combination with each other, or in Table 11, either individually or in combination with each other.

23. The live attenuated SARS-COV-2, SARS-COV-2, SARS-COV-2 particle or SARS-COV-2 nucleic acid of claim 14,
wherein the partly codon deoptimized SARS-COV-2 genome comprises the nucleotide sequence or substantially the same nucleotide sequence as clone SARS-COV-2-77-1, SARS-COV-2-77-2, SARS-COV-2-77-3, SARS-COV-2-77-4, SARS-COV-2-77-5, SARS-COV-2-77-6, SARS-COV-2-77-7, SARS-COV-2-160-1, SARS-COV-2-160-2, SARS-COV-2-160-3, SARS-COV-2-160-4, SARS-COV-2-160-5, SARS-COV-2-160-6, SARS-COV-2-160-7, SARS-COV-2-4N-1 or SARS-COV-2-7N-1, or any variant thereof such as SARS-COV-2-4N-1-Alpha (B1.1.7), SARS-COV-2-4N-1-Beta (B1.351), SARS-CoV-2-4N-1-Gamma (P1), SARS-COV-2-4N-1-Delta, SARS-COV-2-7N-1-Alpha (B1.1.7), SARS-COV-2-7N-1-Beta (B1.351), SARS-COV-2-7N-1-Gamma (P1), or SARS-COV-2-7N-1-Delta.

24. The live attenuated SARS-COV-2, SARS-COV-2, SARS-COV-2 particle or SARS-COV-2 nucleic acid of claim 14,
wherein the partly codon deoptimized SARS-COV-2 genome comprises the nucleotide sequence of clone SARS-COV-2-7N-1, or substantially the same nucleotide sequence as clone SARS-COV-2-7N-1, or any variant thereof such as SARS-COV-2-7N-1-Alpha (B1.1.7), SARS-COV-2-7N-1-Beta (B1.351), SARS-COV-2-7N-1-Gamma (P1), or SARS-COV-2-7N-1-Delta.

25. A vaccine comprising live attenuated SARS-COV-2, SARS-COV-2, SARS-CoV-2 particle or SARS-COV-2 nucleic acid comprising a partly codon deoptimized SARS-COV-2 genome, wherein the partly codon deoptimized SARS-COV-2 genome comprises the nucleotide sequence of clone SARS-COV-2-7N-1 or the sequence of SEQ ID NO:60, or substantially the same nucleotide sequence as clone SARS-COV-2-7N-1 or the sequence of SEQ ID NO:60, or any variant thereof such as SARS-COV-2-7N-1-Alpha (B1.1.7), SARS-COV-2-7N-1-Beta (B1.351), SARS-COV-2-7N-1-Gamma (P1), or SARS-COV-2-7N-1-Delta.

The application's sequence listing, which the Patent Office published only in electronic form, follows.

SEQUENCE LISTING (68 sequences)

SEQ ID NO: 1 - DNA, 35283 bp, Artificial Sequence
  Clone pCCI-4K-SARS-CoV-2-DDDDD. Based on SARS-CoV-2.
gatgtgctgcaaggcgattaagttgggtaacgccagggttttcccagtcacgacgttgtaaaacgacggccagtgaattgtaatacgactcactatagggcgaattctagttattaatagtaatcaattacggggtcattagttcatagcccatatatggagttccgcgttacataacttacggtaaatggcccgcctggctgaccgcccaacgacccccgcccattgacgtcaataatgacgtatgttcccatagtaacgccaatagggactttccattgacgtcaatgggtggagtatttacggtaaactgcccacttggcagtacatcaagtgtatcatatgccaagtacgccccctattgacgtcaatgacggtaaatggcccgcctggcattatgcccagtacatgaccttatgggactttcctacttggcagtacatctacgtattagtcatcgctattaccatggtgatgcggttttggcagtacatcaatgggcgtggatagcggtttgactcacggggatttccaagtctccaccccattgacgtcaatgggagtttgttttggcaccaaaatcaacgggactttccaaaatgtcgtaacaactccgccccattgacgcaaatgggcggtaggcgtgtacggtgggaggtctatataagcagagctggtttagtgaaccgtattaaaggtttataccttcccaggtaacaaaccaaccaactttcgatctcttgtagatctgttctctaaacgaactttaaaatctgtgtggctgtcactcggctgcatgcttagtgcactcacgcagtataattaataactaattactgtcgttgacaggacacgagtaactcgtctatcttctgcaggctgcttacggtttcgtccgtgttgcagccgatcatcagcacatctaggtttcgtccgggtgtgaccgaaaggtaagatggagagccttgtccctggtttcaacgagaaaacacacgtccaactcagtttgcctgttttacaggttcgcgacgtgctcgtacgtggctttggagactccgtggaggaggtcttatcagaggcacgtcaacatcttaaagatggcacttgtggcttagtagaagttgaaaaaggcgttttgcctcaacttgaacagccctatgtgttcatcaaacgttcggatgctcgaactgcacctcatggtcatgttatggttgagctggtagcagaactcgaaggcattcagtacggtcgtagtggtgagacacttggtgtccttgtccctcatgtgggcgaaataccagtggcttaccgcaaggttcttcttcgtaagaacggtaataaaggagctggtggccatagttacggcgccgatctaaagtcatttgacttaggcgacgagcttggcactgatccttatgaagattttcaagaaaactggaacactaaacatagcagtggtgttacccgtgaactcatgcgtgagcttaacggaggggcatacactcgctatgtcgataacaacttctgtggccctgatggctaccctcttgagtgcattaaagaccttctagcacgtgctggtaaagcttcatgcactttgtccgaacaactggactttattgacactaagaggggtgtatactgctgccgtgaacatgagcatgaaattgcttggtacacggaacgttctgaaaagagctatgaattgcagacaccttttgaaattaaattggcaaagaaatttgacaccttcaatggggaatgtccaaattttgtatttcccttaaattccataatcaagactattcaaccaagggttgaaaagaaaaagcttgatggctttatgggtagaattcgatctgtctatccagttgcgtcaccaaatgaatgcaaccaaatgtgcctttcaactctcatgaagtgtgatcattgtggtgaaacttcatggcagacgggcgattttgttaaagccacttgcgaattttgtggcactgagaatttgactaaagaaggtgccactacttgtggttacttaccccaaaatgctgttgttaaaatttattgtccagcatgtcacaattcagaagtaggacctgagcatagtcttgccgaataccataatgaatctggcttgaaaaccattcttcgtaagggtggtcgcactattgcctttggaggctgtgtgttctcttatgttggttgccataacaagtgtgcctattgggtcccgcgtgcgagtgcgaacataggttgtaatcatacgggtgtagtaggtgaaggttcggaaggtctaaatgataatctactagaaatactacaaaaagaaaaagtaaatataaatatagtaggtgattttaaactaaatgaagaaatagcgataatattagcgtcgttttcggcgtcgacgagtgcgtttgtagaaacggtaaaaggtttagattataaagcgtttaaacaaatagtagaatcgtgtggtaattttaaagtgacgaaaggtaaagcgaaaaaaggtgcgtggaatataggtgaacaaaaatcgatactaagtccgctatatgcgtttgcgtcggaagcggcgcgtgtagtacgttcgatattttcgcgtacgctagaaacggcgcaaaattcggtacgtgtattacaaaaagcggcgataacgatactagatggtatatcgcaatattcgctacgtctaatagatgcgatgatgtttacgtcggatttagcgacgaataatctagtagtaatggcgtatataacgggtggtgtagtacaattaacgtcgcaatggctaacgaatatatttggtacggtatatgaaaaactaaaaccggtactagattggctagaagaaaaatttaaagaaggtgtagaatttctacgtgatggttgggaaatagtaaaatttatatcgacgtgtgcgtgtgaaatagtaggtggtcaaatagtaacgtgtgcgaaagaaataaaagaatcggtacaaacgttttttaaactagtaaataaatttctagcgctatgtgcggattcgataataataggtggtgcgaaactaaaagcgctaaatctaggtgaaacgtttgtgacgcattcgaaaggtttatatcgtaaatgtgtaaaatcgcgtgaagaaacgggtctactaatgccgctaaaagcgccgaaagaaataatatttttagaaggtgaaacgctaccgacggaagtattaacggaagaagtagtattaaaaacgggtgatttacaaccgttagaacaaccgacgtcggaagcggtagaagcgccgttagtaggtacgccggtatgtataaatggtctaatgttactagaaataaaagatacggaaaaatattgtgcgctagcgccgaatatgatggtaacgaataatacgtttacgctaaaaggtggtgcgccgacgaaagtaacgtttggtgatgatacggtaatagaagtacaaggttataaatcggtaaatataacgtttgaactagatgaacgtatagataaagtactaaatgaaaaatgttcggcgtatacggtagaactaggtacggaagtaaatgaatttgcgtgtgtagtagcggatgcggtaataaaaacgttacaaccggtatcggaattactaacgccgctaggtatagatttagatgaatggtcgatggcgacgtattatttatttgatgaatcgggtgaatttaaattagcgtcgcatatgtattgttcgttttatccgccggatgaagatgaagaagaaggtgattgtgaagaagaagaatttgaaccgtcgacgcaatatgaatatggtacggaagatgattatcaaggtaaaccgttagaatttggtgcgacgtcggcggcgctacaaccggaagaagaacaagaagaagattggttggatgatgattcgcaacaaacggtaggtcaacaagatggttcggaagataatcaaacgacgacgatacaaacgatagtagaagtacaaccgcaattagaaatggaactaacgccggtagtacaaacgatagaagtaaattcgttttcgggttatttaaaactaacggataatgtatatataaaaaatgcggatatagtagaagaagcgaaaaaagtaaaaccgacggtagtagtaaatgcggcgaatgtatatctaaaacatggtggtggtgtagcgggtgcgttaaataaagcgacgaataatgcgatgcaagtagaatcggatgattatatagcgacgaatggtccgctaaaagtaggtggttcgtgtgtattatcgggtcataatctagcgaaacattgtctacatgtagtaggtccgaatgtaaataaaggtgaagatatacaactactaaaatcggcgtatgaaaattttaatcaacatgaagtactactagcgccgttattatcggcgggtatatttggtgcggacccgatacattcgttacgtgtgtgtgtagatacggtacgcacgaatgtatatttagcggtatttgataaaaatctatatgataaactagtatcgtcgtttttagaaatgaaatcggaaaaacaagtagaacaaaaaatagcggaaataccgaaagaagaagtaaaaccgtttataacggaatcgaaaccgtcggtagaacaacgtaaacaagatgataaaaaaataaaagcgtgtgtagaagaagtaacgacgacgctagaagaaacgaaatttctaacagaaaatttattactatatatagatataaatggtaatctacatccggattcggcgacgctagtatcggatatagatataacgtttttaaaaaaagatgcgccgtatatagtaggtgatgtagtacaagaaggtgtattaacggcggtagtaataccgacgaaaaaagcgggtggtacgacggaaatgctggcgaaagcgttacgtaaagtaccgacggataattatataacgacgtacccgggtcaaggtttaaatggttatacggtagaagaagcgaaaacggtactaaaaaaatgtaaatcggcgttttatatactaccgtcgataatatcgaatgaaaaacaagaaatactaggtacggtatcgtggaatttacgtgaaatgctagcgcatgcggaagaaacacgtaaattaatgccggtatgtgtagaaacgaaagcgatagtatcgacgatacaacgtaaatataaaggtataaaaatacaagaaggtgtagtagattatggtgcgcgtttttatttttatacgtcgaaaacgacggtagcgtcgctaataaatacgctaaatgatctaaatgaaacgctagtaacgatgccgctaggttatgtaacgcatggtttaaatttagaagaagcggcgcgttatatgcgttcgctaaaagtaccggcgacggtatcggtatcgtcgccggatgcggtaacggcgtataatggttatctaacgtcgtcgtcgaaaacgccggaagaacattttatagaaacgatatcgctagcgggttcgtataaagattggtcgtattcgggtcaatcgacgcaactaggtatagaatttctaaaacgtggtgataaatcggtatattatacgtcgaatccgacgacgtttcatctagatggtgaagtaataacgtttgataatctaaaaacgctactatcgttacgtgaagtacgtacgataaaagtatttacgacggtagataatataaatctacatacgcaagtagtagatatgtcgatgacatatggacaacaatttggtccgacgtatttagatggtgcggatgttacgaaaataaaaccgcataattcgcatgaaggtaaaacgttttatgtattaccgaatgatgatacgctacgtgtagaagcgtttgaatattatcatacgactgatccgtcgtttctaggtcgttatatgtcggcgttaaatcatacgaaaaaatggaaatatccgcaagtaaatggtttaacgtcgataaaatgggcggataataattgttatctagcgacggcgttattaacgctacaacaaatagaattaaaatttaatccgccggcgctacaagatgcgtattatcgtgcgcgtgcgggtgaagcggcgaatttttgtgcgctaatattagcgtattgtaataaaacggtaggtgaattaggtgatgtacgtgaaacgatgtcgtatttatttcaacatgcgaatttagattcgtgtaaacgtgtattaaatgtagtatgtaaaacgtgtggtcaacaacaaacgacgctaaaaggtgtagaagcggtaatgtatatgggtacgctatcgtatgaacaatttaaaaaaggtgtacaaataccgtgtacgtgtggtaaacaagcgacgaaatatctagtacaacaagaatcgccgtttgtaatgatgtcggcgccgccggcgcaatatgaactaaaacatggtacgtttacgtgtgcgtcggaatatacgggtaattatcaatgtggtcattataaacatataacgtcgaaagaaacgttatattgtatagatggtgcgttacttacgaaatcgtcggaatataaaggtccgataacggatgtattttataaagaaaattcgtatacgacgacgataaaaccggtaacgtataaattagatggtgtagtatgtacggaaatagatccgaaattagataattattataaaaaagataattcgtattttacggaacaaccgatagatctagtaccgaatcaaccatatccgaatgcgtcgtttgataattttaaatttgtatgtgataatataaaatttgcggatgatttaaatcaattaacgggttataaaaaaccggcgtcgcgtgaactaaaagtaacgttttttccggatttaaatggtgatgtagtagcgatagattataaacattatacgccgtcgtttaaaaaaggtgcgaaattattacataaaccgatagtatggcatgtaaataatgcgacgaataaagcgacgtataaaccgaatacgtggtgtatacggtgtctatggagcacgaaaccggtagaaacgtcgaattcgtttgatgtactaaaatcggaagatgcgcaaggtatggataatctagcgtgtgaagatctaaaaccggtatcggaagaagtagtagaaaatccgacgatacaaaaagatgtactggaatgtaatgtaaaaacgacggaagtagtaggtgatataatactaaaaccggctaataattcgttaaaaataacggaagaagtaggtcatacggatctaatggcggcgtatgtagataattcgtcgctaacgataaaaaaaccgaatgaattatcgcgtgtattaggtttaaaaacgctagcgacgcatggtttagctgctgtaaattcggtaccgtgggatacgatagcgaattatgcgaaaccgtttctaaataaagtagtatcgacgacgacgaatatagtaacgcgatgtttaaatcgtgtatgtacgaattatatgccgtatttttttacgttattactacaattatgtacgtttacgcgatcgacgaattcgcgtataaaagcgtcgatgccgacgacgatagcgaaaaatacggtaaaatcggtaggtaaattttgtctagaagcgtcgtttaattatttaaaatcgccgaatttttctaaactaataaatataataatatggtttttactattatcggtatgcctaggttcgttaatatattcgacggcggcgttaggtgtattaatgtcgaatttaggtatgccgtcgtattgtacgggttatcgtgaaggttatttaaattcgacgaatgtaacgatagcgacgtattgtacgggttcgataccgtgttcggtatgtctatcgggtttagattcgttagatacgtatccgtcgttagaaacgatacaaataacgatatcgtcgtttaaatgggatttaacggcgtttggtttagtagcggaatggtttttagcgtatatactatttacgcgatttttttatgtactaggtttagcggcgataatgcaattatttttttcgtattttgcggtacattttatttcgaattcgtggctaatgtggttaataataaatctagtacaaatggcgccgatatcggcgatggtacgtatgtatatattttttgcgtcgttttattatgtatggaaatcgtatgtacatgtagtagatggttgtaattcgtcgacgtgtatgatgtgttataaacgtaatcgtgcgacgcgagtagaatgtacgacgatagtaaatggtgtacgtcgttcgttttatgtatatgcgaatggtggtaaaggtttttgtaaactacataattggaattgtgtaaattgtgatacgttttgtgcgggttcgacgtttatatcggatgaagtagcgcgtgatttatcgctacaatttaaacgtccgataaatccgacggatcaatcgtcgtatatagtagattcggtaacggtaaaaaatggttcgatacatctatattttgataaagcgggtcaaaaaacgtatgaacgtcattcgctatcgcattttgtaaatttagataatctacgtgcgaataatacgaaaggttcgttaccgataaatgtaatagtatttgatggtaaatcgaaatgtgaagaatcgtcggcgaaatcggcgtcggtatattattcgcaactaatgtgtcaaccgatactattactagatcaagcgttagtatcggatgtaggtgattcggcggaagtagcggtaaaaatgtttgatgcgtatgtaaatacgttttcgtcgacgtttaatgtaccgatggaaaaactaaaaacgctagtagcgacggcggaagcggaactagcgaaaaatgtatctttagataatgtattatcgacgtttatatcggcggcgcgtcaaggttttgtagattcggatgtagaaacgaaagatgtagtagaatgtctaaaattatcgcatcaatcggatatagaagtaacgggtgattcgtgtaataattatatgctaacgtataataaagtagaaaatatgacgccgcgtgatctaggtgcgtgtatagattgttcggcgcgtcatataaatgcgcaagtagcgaaatcgcataatatagcgttaatatggaatgtaaaagattttatgtcgttatcggaacaactacgtaaacaaatacgttcggcggcgaaaaaaaataatttaccgtttaaattaacgtgtgcgacgacgcgacaagtagtaaatgtagtaacgacgaaaatagcgctaaaaggtggtaaaatagtaaataattggttaaaacaattaattaaagtaacgctagtatttctatttgtagcggcgatattttatttaataacgccggtacatgtaatgtcgaaacatacggatttttcgtcggaaataataggttataaagcgatagatggtggtgtaactcgtgatatagcgtcgacggatacgtgttttgcgaataaacatgcggattttgatacgtggttttcgcaacgtggtggttcgtatacgaatgataaagcgtgtccgttaatagcggcggtaataacacgtgaagtaggttttgtagtaccgggtttaccgggtacgatattacgtacgacgaatggtgattttttacattttttaccgcgtgtattttcggcggtaggtaatatatgttatacgccgtcgaaactaatagaatatacggattttgcgacgtcggcgtgtgtattagcggcggaatgtacgatatttaaagatgcgtcgggtaaaccggtaccgtattgttatgatacgaatgtactagaaggttcggtagcgtatgaatcgttacgcccggatacacgttatgtactaatggatggttcgataatacaatttccgaatacgtatctagaaggttcggtacgtgtagtaacgacgtttgattcggaatattgtcgtcatggtacgtgtgaacgttcggaagcgggtgtatgtgtatcgacgtcggggcgttgggtactaaataatgattattatcgttcgttaccgggtgtattctgtggtgtagatgcggtaaatttactaacgaatatgtttacgccgctgatacaaccgataggtgcgttagatatatcggcgtcgatagtagcgggtggtatagtagcgatagtagtaacgtgtctagcgtattattttatgcgttttcgtcgtgcgtttggtgaatattcgcatgtagtagcgtttaatacgttactatttctaatgtcttttacagtactatgtttaacgccggtatattcttttttaccgggtgtatattcggtaatatatttatatttaacgttttatctaacgaatgatgtatcgtttttagcgcatatacaatggatggtaatgtttacgccgttagtaccgttttggataacaatagcgtatataatatgtatatcgacgaaacatttttattggtttttttcgaattatctgaaacgtcgtgtagtatttaatggtgtatctttttcgacgtttgaagaagcggcgctatgtacatttttattaaataaagaaatgtatctaaaattacgttcggatgtactattaccgctaacgcaatataatcgttatttagcgctatataataaatataaatatttttcgggtgcgatggatacgacgtcgtatcgtgaagcggcgtgttgtcatctagcgaaagcgctaaatgatttttcgaattcgggttcggatgtactatatcaaccgccgcaaacgtcgataacgtcggcggtattacaatcgggttttcgtaaaatggcgtttccgtcgggtaaagtagaaggttgtatggtacaagtaacgtgtggtacgacgacgctaaatggtctatggctagatgatgtagtatattgtccgcgtcatgtaatatgtacgtcggaagatatgctaaatccgaattatgaagatttactaatacgtaaatcgaatcataattttttagtacaagcgggtaatgtacaactacgtgtaataggtcattcgatgcaaaattgtgtactaaaactaaaagtagatacggcgaatccgaaaacaccgaaatataaatttgtacgtatacaaccgggtcaaacgttttcggtattagcgtgttataatggttctccgtcgggtgtatatcaatgtgcgatgcgtccgaattttacgattaaaggttcgtttctaaatggttcgtgtggttcggtaggttttaatatagattatgattgtgtatcgttttgttatatgcatcatatggaattaccgacgggtgtacatgcgggtacggatttagaaggtaatttttatggtccgtttgtagatcgtcaaacagcgcaagcggcgggtacggatacgacgattacggtaaatgtattagcgtggttatatgcggcggtaataaatggtgatcgttggtttctaaatcgttttacgacgacgctaaatgattttaatctagtagcgatgaaatataattatgaaccgctgacacaagatcatgtagatatactaggtccgctatcggcgcaaacgggtatagcggtattagatatgtgtgcgtcgttaaaagaattactacaaaatggtatgaatggtcgtacgatattaggttcggcgttattagaagatgaatttacgccgtttgatgtagtacgtcaatgttcgggtgtaacgtttcaatcggcggtaaaacgtacgataaaaggtacgcatcattggttattactaacgatattaacgtcgctattagtattagtacaatcgacgcaatggtcgttatttttttttttatatgaaaatgcgtttttaccgtttgcgatgggtataatagcgatgtcggcgtttgcgatgatgtttgtaaaacataagcatgcgtttctatgtttatttttattaccgtcgctagcgacggtagcgtattttaatatggtatatatgccggcgtcgtgggtaatgcgtataatgacgtggttagatatggtagatacgtcgttatcgggttttaaactaaaagattgtgtaatgtatgcgtcggcggtagtattactaatactaatgacggcgcgtacggtatatgatgatggtgcgcgtcgtgtatggacgctaatgaatgtattaacgctagtatataaagtatattatgggaatgcgttagatcaagcgatatcgatgtgggcgctaataatatcggtaacgtcgaattattcgggtgtagtaacgacggtaatgtttttagcgcgtggtatagtatttatgtgtgtagaatattgtccgatattttttataacgggtaatacactacaatgtataatgctagtatattgttttttaggttatttttgtacgtgttattttggtctattttgtttactaaatcgttattttcgtctaacactaggtgtatatgattatttagtatcgacgcaagaatttcgttatatgaattcgcaaggtctactaccgccgaaaaattcgatagatgcgtttaaactaaatataaaattattaggtgtaggtggtaaaccgtgtataaaagtagcgacggtacaatcgaaaatgtcggatgtaaaatgtacatcggtagtattactatcggtattacaacaactacgtgtagaatcgtcgtcgaaattatgggcgcaatgtgtacaattacataatgatatactattagcgaaagatacgacggaagcgtttgaaaaaatggtatcgctactatcggtattactatcgatgcaaggtgcggtagatataaataaactatgtgaagaaatgctagataatcgtgcgacgttacaagcgatagcgtcggaattttcgtcgctaccgtcgtatgcggcgtttgcgacggcgcaagaagcgtatgaacaagcggtagcgaatggtgattcggaagtagtactaaaaaaattaaaaaaatcgttaaatgtagcgaaatcggaatttgatcgtgatgcggcgatgcaacgtaaattagaaaaaatggcggatcaagcgatgacgcaaatgtataaacaagcgcgttcggaagataaacgtgcgaaagtaacgtcggcgatgcaaacgatgctatttacgatgctacgtaaattagataatgatgcgctaaataatataataaataatgcgcgtgatggttgtgtaccgttaaatataataccgctaacgacggcggcgaaactaatggtagtaataccggattataatacatataaaaatacgtgtgatggtacgacgtttacgtatgcgtcggcgttatgggaaatacaacaagtagtagatgcggattcgaaaatagtacaactatcggaaatatcgatggataattcgccgaatttagcgtggccgctaatagtaacggcgttacgtgcgaattcggcggtaaaattacaaaataatgaactatcgccggtagcgctacgacagatgtcttgtgctgccggtactacacaaactgcttgcactgatgacaatgcgttagcttactacaacacaacaaagggaggtaggtttgtacttgcactgttatccgatttacaggatttgaaatgggctagattccctaagagtgatggaactggtactatctatacagaactggaaccaccttgtaggtttgttacagacacacctaaaggtcctaaagtgaagtatttatactttattaaaggattaaacaacctaaatagaggtatggtacttggtagtttagctgccacagtacgtctacaagctggtaatgcaacagaagtgcctgccaattcaactgtattatctttctgtgcttttgctgtagatgctgctaaagcttacaaagattatctagctagtgggggacaaccaatcactaattgtgttaagatgttgtgtacacacactggtactggtcaggcaataacagttacaccggaagccaatatggatcaagaatcctttggtggtgcatcgtgttgtctgtactgccgttgccacatagatcatccaaatcctaaaggattttgtgacttaaaaggtaagtatgtacaaatacctacaacttgtgctaatgaccctgtgggttttacacttaaaaacacagtctgtaccgtctgcggtatgtggaaaggttatggctgtagttgtgatcaactccgcgaacccatgcttcagtcagctgatgcacaatcgtttttaaacgggtttgcggtgtaagtgcagcccgtcttacaccgtgcggcacaggcactagtactgatgtcgtatacagggcttttgacatctacaatgataaagtagctggttttgctaaattcctaaaaactaattgttgtcgcttccaagaaaaggacgaagatgacaatttaattgattcttactttgtagttaagagacacactttctctaactaccaacatgaagaaacaatttataatttacttaaggattgtccagctgttgctaaacatgacttctttaagtttagaatagacggtgacatggtaccacatatatcacgtcaacgtcttactaaatacacaatggcagacctcgtctatgctttaaggcattttgatgaaggtaattgtgacacattaaaagaaatacttgtcacatacaattgttgtgatgatgattatttcaataaaaaggactggtatgattttgtagaaaacccagatatattacgcgtatacgccaacttaggtgaacgtgtacgccaagctttgttaaaaacagtacaattctgtgatgccatgcgaaatgctggtattgttggtgtactgacattagataatcaagatctcaatggtaactggtatgatttcggtgatttcatacaaaccacgccaggtagtggagttcctgttgtagattcttattattcattgttaatgcctatattaaccttgaccagggctttaactgcagagtcacatgttgacactgacttaacaaagccttacattaagtgggatttgttaaaatatgacttcacggaagagaggttaaaactctttgaccgttattttaaatattgggatcagacataccacccaaattgtgttaactgtttggatgacagatgcattctgcattgtgcaaactttaatgttttattctctacagtgttcccacctacaagttttggaccactagtgagaaaaatatttgttgatggtgttccatttgtagtttcaactggataccacttcagagagctaggtgttgtacataatcaggatgtaaacttacatagctctagacttagttttaaggaattacttgtgtatgctgctgaccctgctatgcacgctgcttctggtaatctattactagataaacgcactacgtgcttttcagtagctgcacttactaacaatgttgcttttcaaactgtcaaacccggtaattttaacaaagacttctatgactttgctgtgtctaagggtttctttaaggaaggaagttctgttgaattaaaacacttcttctttgctcaggatggtaatgctgctatcagcgattatgactactatcgttataatctaccaacaatgtgtgatatcagacaactactatttgtagttgaagttgttgataagtactttgattgttacgatggtggctgtattaatgctaaccaagtcatcgtcaacaacctagacaaatcagctggttttccatttaataaatggggtaaggctagactttattatgattcaatgagttatgaggatcaagatgcacttttcgcatatacaaaacgtaatgtcatccctactataactcaaatgaatcttaagtatgccattagtgcaaagaatagagctcgcaccgtagctggtgtctctatctgtagtactatgaccaatagacagtttcatcaaaaattattgaaatcaatagccgccactagaggagctactgtagtaattggaacaagcaaattctatggtggttggcacaacatgttaaaaactgtttatagtgatgtagaaaaccctcaccttatgggttgggattatcctaaatgtgatagagccatgcctaacatgcttagaattatggcctcacttgttcttgctcgcaaacatacaacgtgttgtagcttgtcacaccgtttctatagattagctaatgagtgtgctcaagtattgagtgaaatggtcatgtgtggcggttcactatatgttaaaccaggtggaacctcatcaggagatgccacaactgcttatgctaatagtgtttttaacatttgtcaagctgtcacggccaatgttaatgcacttttatctactgatggtaacaaaattgccgataagtatgtccgcaatttacaacacagactttatgagtgtctctatagaaatagagatgttgacacagactttgtgaatgagttttacgcatatttgcgtaaacatttctcaatgatgatactctctgacgatgctgttgtgtgtttcaatagcacttatgcatctcaaggtctagtggctagcataaagaactttaagtcagttctttattatcaaaacaatgtttttatgtctgaagcaaaatgttggactgagactgaccttactaaaggacctcatgaattttgctctcaacatacaatgctagttaaacagggtgatgattatgtgtaccttccttacccagatccatcaagaatcctaggggccggctgttttgtagatgatatcgtaaaaacagatggtacacttatgattgaacggttcgtgtctttagctatagatgcttacccacttactaaacatcctaatcaggagtatgctgatgtctttcatttgtacttacaatacataagaaagctacatgatgagttaacaggacacatgttagacatgtattctgttatgcttactaatgataacacttcaaggtattgggaacctgagttttatgaggctatgtacacaccgcatacagtcttacaggctgttggggcttgtgttctttgcaattcacagacttcattaagatgtggtgcttgcatacgtagaccattcttatgttgtaaatgctgttacgaccatgtcatatcaacatcacataaattagtcttgtctgttaatccgtatgtttgcaatgctccaggttgtgatgtcacagatgtgactcaactttacttaggaggtatgagctattattgtaaatcacataaaccacccattagttttccattgtgtgctaatggacaagtttttggtttatataaaaatacatgtgttggtagcgataatgttactgactttaatgcaattgcaacatgtgactggacaaatgctggtgattacattttagctaacacctgtactgaaagactcaagctttttgcagcagaaacgctcaaagctactgaggagacatttaaactgtcttatggtattgctactgtacgtgaagtgctgtctgacagagaattacatctttcatgggaagttggtaaacctagaccaccacttaaccgaaattatgtctttactggttatcgtgtaactaaaaacagtaaagtacaaataggagagtacacctttgaaaaaggtgactatggtgatgctgttgtttaccgaggtacaacaacttacaaattaaatgttggtgattattttgtgctgacatcacatacagtaatgccattaagtgcacctacactagtgccacaagagcactatgttagaattactggcttatacccaacactcaatatctcagatgagttttctagcaatgttgcaaattatcaaaaggttggtatgcaaaagtattctacactccagggaccacctggtactggtaagagtcattttgctattggcctagctctctactacccttctgctcgcatagtgtatacagcttgctctcatgccgctgttgatgcactatgtgagaaggcattaaaatatttgcctatagataaatgtagtagaattatacctgcacgtgctcgtgtagagtgttttgataaattcaaagtgaattcaacattagaacagtatgtcttttgtactgtaaatgcattgcctgagacgacagcagatatagttgtctttgatgaaatttcaatggccacaaattatgatttgagtgttgtcaatgccagattacgtgctaagcactatgtgtacattggcgaccctgctcaattacctgcaccacgcacattgctaactaagggcacactagaaccagaatatttcaattcagtgtgtagacttatgaaaactataggtccagacatgttcctcggaacttgtcggcgttgtcctgctgaaattgttgacactgtgagtgctttggtttatgataataagcttaaagcacataaagacaaatcagctcaatgctttaaaatgttttataagggtgttatcacgcatgatgtttcatctgcaattaacaggccacaaataggcgtggtaagagaattccttacacgtaaccctgcttggagaaaagctgtctttatttcaccttataattcacagaatgctgtagcctcaaagattttgggactaccaactcaaactgttgattcatcacagggctcagaatatgactatgtcatattcactcaaaccactgaaacagctcactcttgtaatgtaaacagatttaatgttgctattaccagagcaaaagtaggcatactttgcataatgtctgatagagacctttatgacaagttgcaatttacaagtcttgaaattccacgtaggaatgtggcaactttacaagctgaaaatgtaacaggactctttaaagattgtagtaaggtaatcactgggttacatcctacacaggcacctacacacctcagtgttgacactaaattcaaaactgaaggtttatgtgttgacatacctggcatacctaaggacatgacctatagaagactcatctctatgatgggttttaaaatgaattatcaagttaatggttaccctaacatgtttatcacccgcgaagaagctataagacatgtacgtgcatggattggcttcgatgtcgaggggtgtcatgctactagagaagctgttggtaccaatttacctttacagctaggtttttctacaggtgttaacctagttgctgtacctacaggttatgttgatacacctaataatacagatttttccagagttagtgctaaaccaccgcctggagatcaatttaaacacctcataccacttatgtacaaaggacttccttggaatgtagtgcgtataaagattgtacaaatgttaagtgacacacttaaaaatctctctgacagagtcgtatttgtcttatgggcacatggctttgagttgacatctatgaagtattttgtgaaaataggacctgagcgcacctgttgtctatgtgatagacgtgccacatgcttttccactgcttcagacacttatgcctgttggcatcattctattggatttgattacgtctataatccgtttatgattgatgttcaacaatggggttttacaggtaacctacaaagcaaccatgatctgtattgtcaagtccatggtaatgcacatgtagctagttgtgatgcaatcatgactaggtgtctagctgtccacgagtgctttgttaagcgtgttgactggactattgaatatcctataattggtgatgaactgaagattaatgcggcttgtagaaaggttcaacacatggttgttaaagctgcattattagcagacaaattcccagttcttcacgacattggtaaccctaaagctattaagtgtgtacctcaagctgatgtagaatggaagttctatgatgcacagccttgtagtgacaaagcttataaaatagaagaattattctattcttatgccacacattctgacaaattcacagatggtgtatgcctattttggaattgcaatgtcgatagatatcctgctaattccattgtttgtagatttgacactagagtgctatctaaccttaacttgcctggttgtgatggtggcagtttgtatgtaaataaacatgcattccacacaccagcttttgataaaagtgcttttgttaatttaaaacaattaccatttttctattactctgacagtccatgtgagtctcatggaaaacaagtagtgtcagatatagattatgtaccactaaagtctgctacgtgtataacacgttgcaatttaggtggtgctgtctgtagacatcatgctaatgagtacagattgtatctcgatgcttataacatgatgatctcagctggctttagcttgtgggtttacaaacaatttgatacttataacctctggaacacttttacaagacttcagagtttagaaaatgtggcttttaatgttgtaaataagggacactttgatggacaacagggtgaagtaccagtttctatcattaataacactgtttacacaaaagttgatggtgttgatgtagaattgtttgaaaataaaacaacattacctgttaatgtagcatttgagctttgggctaagcgcaacattaaaccagtaccagaggtgaaaatactcaataatttgggtgtggacattgctgctaatactgtgatctgggactacaaaagagatgctccagcacatatatctactattggtgtttgttctatgactgacatagccaagaaaccaactgaaacgatttgtgcaccactcactgtcttttttgatggtagagttgatggtcaagtagacttatttagaaatgcccgtaatggtgttcttattacagaaggtagtgttaaaggtttacaaccatctgtaggtcccaaacaagctagtcttaatggagtcacattaattggagaagccgtaaaaacacagttcaattattataagaaagttgatggtgttgtccaacaattacctgaaacttactttactcagagtagaaatttacaagaatttaaacccaggagtcaaatggaaattgatttcttagaattagctatggatgaattcattgaacggtataaattagaaggctatgccttcgaacatatcgtttatggagattttagtcatagtcagttaggtggtttacatctactgattggactagctaaacgttttaaggaatcaccttttgaattagaagattttattcctatggacagtacagttaaaaactatttcataacagatgcgcaaacaggttcatctaagtgtgtgtgttctgttattgatttattacttgatgattttgttgaaataataaaatcccaagatttatctgtagtttctaaggttgtcaaagtgactattgactatacagaaatttcatttatgctttggtgtaaagatggccatgtagaaacattttacccaaaattacaatctagtcaagcgtggcaaccgggtgttgctatgcctaatctttacaaaatgcaaagaatgctattagaaaagtgtgaccttcaaaattatggtgatagtgcaacattacctaaaggcataatgatgaatgtcgcaaaatatactcaactgtgtcaatatttaaacacattaacattagctgtaccctataatatgagagttatacattttggtgctggttctgataaaggagttgcaccaggtacagctgttttaagacagtggttgcctacgggtacgctgcttgtcgattcagatcttaatgactttgtctctgatgcagattcaactttgattggtgattgtgcaactgtacatacagctaataaatgggatctcattattagtgatatgtacgaccctaagactaaaaatgttacaaaagaaaatgactctaaagagggttttttcacttacatttgtgggtttatacaacaaaagctagctcttggaggttccgtggctataaagataacagaacattcttggaatgctgatctttataagctcatgggacacttcgcatggtggacagcctttgttactaatgtgaatgcgtcatcatctgaagcatttttaattggatgtaattatcttggcaaaccacgcgaacaaatagatggttatgtcatgcatgcaaattacatattttggaggaatacaaatccaattcagttgtcttcctattctttatttgacatgagtaaatttccccttaaattaaggggtactgctgttatgtctttaaaagaaggtcaaatcaatgatatgattttatctcttcttagtaaaggtagacttataattagagaaaacaacagagttgttatttctagtgatgttcttgttaacaactaaacgaacaatgtttgtttttcttgttttattgccactagtctctagtcagtgtgttaatcttacaaccagaactcaattaccccctgcatacactaattctttcacacgtggtgtttattaccctgacaaagttttcagatcctcagttttacattcaactcaggacttgttcttacctttcttttccaatgttacttggttccatgctatacatgtctctgggaccaatggtactaagaggtttgataaccctgtcctaccatttaatgatggtgtttattttgcttccactgagaagtctaacataataagaggctggatttttggtactactttagattcgaagacccagtccctacttattgttaataacgctactaatgttgttattaaagtctgtgaatttcaattttgtaatgatccatttttgggtgtttattaccacaaaaacaacaaaagttggatggaaagtgagttcagagtttattctagtgcgaataattgcacttttgaatatgtctctcagccttttcttatggaccttgaaggaaaacagggtaatttcaaaaatcttagggaatttgtgtttaagaatattgatggttattttaaaatatattctaagcacacgcctattaatttagtgcgtgatctcccccagggtttttcggctttagaaccattggtagatttgccaataggtattaacatcactaggtttcaaactttacttgctttacatagaagttatttgactcctggtgattcttcttcaggttggacagctggtgctgcagcttattatgtgggttatcttcaacctaggacttttctattaaaatataatgaaaatggaaccattacagatgctgtagactgtgcacttgaccctctctcagaaacaaagtgtacgttgaaatccttcactgtagaaaaaggaatctatcaaacttctaactttagagtccaaccaacagaatctattgttagatttcctaatattacaaacttgtgcccttttggtgaagtttttaacgccaccagatttgcatctgtttatgcttggaacaggaagagaatcagcaactgtgttgctgattattctgtcctatataattccgcatcattttccacttttaagtgttatggagtgtctcctactaaattaaatgatctctgctttactaatgtctatgcagattcatttgtaattagaggtgatgaagtcagacaaatcgctccagggcaaactggaaagattgctgattataattataaattaccagatgattttacaggctgcgttatagcttggaattctaacaatcttgattctaaggttggtggtaattataattacctgtatagattgtttaggaagtctaatctcaaaccttttgagagagatatttcaactgaaatctatcaggccggtagcacaccttgtaatggtgttgaaggttttaattgttactttcctttacaatcatatggtttccaacccactaatggtgttggttaccaaccatacagagtagtagtactttcttttgaacttctacatgcaccagcaactgtttgtggacctaaaaagtctactaatttggttaaaaacaaatgtgtcaatttcaacttcaatggtttaacaggcacaggtgttcttactgagtctaacaaaaagtttctgcctttccaacaatttggcagagacattgctgacactactgatgctgtccgtgatccacagacacttgagattcttgacattacaccatgttcttttggtggtgtcagtgttataacaccaggaacaaatacttctaaccaggttgctgttctttatcaggatgttaactgcacagaagtccctgttgctattcatgcagatcaacttactcctacttggcgtgtttattctacaggttctaatgtttttcaaacacgtgcaggctgtttaataggggctgaacatgtcaacaactcatatgagtgtgacatacccattggtgcaggtatatgcgctagttatcagactcagactaattctcctcggcgggcacgtagtgtagctagtcaatccatcattgcctacactatgtcacttggtgcagaaaattcagttgcttactctaataactctattgccatacccacaaattttactattagtgttaccacagaaattctaccagtgtctatgaccaagacatcagtagattgtacaatgtacatttgtggtgattcaactgaatgcagcaatcttttgttgcaatatggcagtttttgtacacaattaaaccgtgctttaactggaatagctgttgaacaagacaaaaacacccaagaagtttttgcacaagtcaaacaaatttacaaaacaccaccaattaaagattttggtggttttaatttttcacaaatattaccagatccatcaaaaccaagcaagaggtcatttattgaagatctacttttcaacaaagtgacacttgcagatgctggcttcatcaaacaatatggtgattgccttggtgatattgctgctagagacctcatttgtgcacaaaagtttaacggccttactgttttgccacctttgctcacagatgaaatgattgctcaatacacttctgcactgttagcgggtacaatcacttctggttggacctttggtgcaggtgctgcattacaaataccatttgctatgcaaatggcttataggtttaatggtattggagttacacagaatgttctctatgagaaccaaaaattgattgccaaccaatttaatagtgctattggcaaaattcaagactcactttcttccacagcaagtgcacttggaaaacttcaagatgtggtcaaccaaaatgcacaagctttaaacacgcttgttaaacaacttagctccaattttggtgcaatttcaagtgttttaaatgatatcctttcacgtcttgacaaagttgaggctgaagtgcaaattgataggttgatcacaggcagacttcaaagtttgcagacatatgtgactcaacaattaattagagctgcagaaatcagagcttctgctaatcttgctgctactaaaatgtcagagtgtgtacttggacaatcaaaaagagttgatttttgtggaaagggctatcatcttatgtccttccctcagtcagcacctcatggtgtagtcttcttgcatgtgacttatgtccctgcacaagaaaagaacttcacaactgctcctgccatttgtcatgatggaaaagcacactttcctcgtgaaggtgtctttgtttcaaatggcacacactggtttgtaacacaaaggaatttttatgaaccacaaatcattactacagacaacacatttgtgtctggtaactgtgatgttgtaataggaattgtcaacaacacagtttatgatcctttgcaacctgaattagactcattcaaggaggagttagataaatattttaagaatcatacatcaccagatgttgatttaggtgacatctctggcattaatgcttcagttgtaaacattcaaaaagaaattgaccgcctcaatgaggttgccaagaatttaaatgaatctctcatcgatctccaagaacttggaaagtatgagcagtatataaaatggccatggtacatttggctaggttttatagctggcttgattgccatagtaatggtgacaattatgctttgctgtatgaccagttgctgtagttgtctcaagggctgttgttcttgtggatcctgctgcaaatttgatgaagacgactctgagccagtgctcaaaggagtcaaattacattacacataaacgaacttatggatttgtttatgagaatcttcacaattggaactgtaactttgaagcaaggtgaaatcaaggatgctactccttcagattttgttcgcgctactgcaacgataccgatacaagcctcactccctttcggatggcttattgttggcgttgcacttcttgctgtttttcagagcgcttccaaaatcataaccctcaaaaagagatggcaactagcactctccaagggtgttcactttgtttgcaacttgctgttgttgtttgtaacagtttactcacaccttttgctcgttgctgctggccttgaagccccttttctctatctttatgctttagtctacttcttgcagagtataaactttgtaagaataataatgaggctttggctttgctggaaatgccgttccaaaaacccattactttatgatgccaactattttctttgctggcatactaattgttacgactattgtataccttacaatagtgtaacttcttcaattgtcattacttcaggtgatggcacaacaagtcctatttctgaacatgactaccagattggtggttatactgaaaaatgggaatctggagtaaaagactgtgttgtattacacagttacttcacttcagactattaccagctgtactcaactcaattgagtacagacactggtgttgaacatgttaccttcttcatctacaataaaattgttgatgagcctgaagaacatgtccaaattcacacaatcgacggttcatccggagttgttaatccagtaatggaaccaatttatgatgaaccgacgacgactactagcgtgcctttgtaagcacaagctgatgagtacgaacttatgtactcattcgtttcggaagagacaggtacgttaatagttaatagcgtacttctttttcttgctttcgtggtattcttgctagttacactagccatccttactgcgcttcgattgtgtgcgtactgctgcaatattgttaacgtgagtcttgtaaaaccttctttttacgtttactctcgtgttaaaaatctgaattcttctagagttcctgatcttctggtctaaacgaactaaatattatattagtttttctgtttggaactttaattttagccatggcagattccaacggtactattaccgttgaagagcttaaaaagctccttgaacaatggaacctagtaataggtttcctattccttacatggatttgtcttctacaatttgcctatgccaacaggaataggtttttgtatataattaagttaattttcctctggctgttatggccagtaactttagcttgttttgtgcttgctgctgtttacagaataaattggatcaccggtggaattgctatcgcaatggcttgtcttgtaggcttgatgtggctcagctacttcattgcttctttcagactgtttgcgcgtacgcgatccatgtggtcattcaatccagaaactaacattcttctcaacgtgccactccatggcactattctgaccagaccgcttctagaaagtgaactcgtaatcggagctgtgatccttcgtggacatcttcgtattgctggacaccatctaggacgctgtgacatcaaggacctgcctaaagaaatcactgttgctacatcacgaacgctttcttattacaaattgggagcttcgcagcgtgtagcaggtgactcaggttttgctgcatacagtcgctacaggattggcaactataaattaaacacagaccattccagtagcagtgacaatattgctttgcttgtacagtaagtgacaacagatgtttcatctcgttgactttcaggttactatagcagagatattactaattattatgaggacttttaaagtttccatttggaatcttgattacatcataaacctcataattaaaaatttatctaagtcactaactgagaataaatattctcaattagatgaagagcaaccaatggagattgattaaacgaacatgaaaattattcttttcttggcactgataacactcgctacttgtgagctttatcactaccaagagtgtgttagaggtacaacagtacttttaaaagaaccttgctcttctggaacatacgagggcaattcaccatttcatcctctagctgataacaaatttgcactgacttgctttagcactcaatttgcttttgcttgtcctgacggcgtaaaacacgtctatcagttacgtgccagatcagtttcacctaaactgttcatcagacaagaggaagttcaagaactttactctccaatttttcttattgttgcggcaatagtgtttataacactttgcttcacactcaaaagaaagacagaatgattgaactttcattaattgacttctatttgtgctttttagcctttctgctattccttgttttaattatgcttattatcttttggttctcacttgaactgcaagatcataatgaaacttgtcacgcctaaacgaacatgaaatttcttgttttcttaggaatcatcacaactgtagctgcatttcaccaagaatgtagtttacagtcatgtactcaacatcaaccatatgtagttgatgacccgtgtcctattcacttctattctaaatggtatattagagtaggagctagaaaatcagcacctttaattgaattgtgcgtggatgaggctggttctaaatcacccattcagtacatcgatatcggtaattatacagtttcctgtttaccttttacaattaattgccaggaacctaaattgggtagtcttgtagtgcgttgttcgttctatgaagactttttagagtatcatgacgttcgtgttgttttagatttcatctaaacgaacaaactaaaatgtctgataatggaccccaaaatcagcgaaatgcaccccgcattacgtttggtggaccctcagattcaactggcagtaaccagaatggagaacgcagtggggcgcgatcaaaacaacgtcggccccaaggtttacccaataatactgcgtcttggttcaccgctctcactcaacatggcaaggaagaccttaaattccctcgaggacaaggcgttccaattaacaccaatagcagtccagatgaccaaattggctactaccgaagagctaccagacgaattcgtggtggtgacggtaaaatgaaagatctcagtccaagatggtatttctactacctaggaactgggccagaagctggacttccctatggtgctaacaaagacggcatcatatgggttgcaactgagggagccttgaatacaccaaaagatcacattggcacccgcaatcctgctaacaatgctgcaatcgtgctacaacttcctcaaggaacaacattgccaaaaggcttctacgcagaagggagcagaggcggcagtcaagcctcttctcgttcctcatcacgtagtcgcaacagttcaagaaattcaactccaggcagcagtaggggaacttctcctgctagaatggctggcaatggcggtgatgctgctcttgctttgctgctgcttgacagattgaaccagcttgagagcaaaatgtctggtaaaggccaacaacaacaaggccaaactgtcactaagaaatctgctgctgaggcttctaagaagcctcggcaaaaacgtactgccactaaagcatacaatgtaacacaagctttcggcagacgtggtccagaacaaacccaaggaaattttggggaccaggaactaatcagacaaggaactgattacaaacattggccgcaaattgcacaatttgcccccagcgcttcagcgttcttcggaatgtcgcgcattggcatggaagtcacaccttcgggaacgtggttgacctacacaggtgccatcaaattggatgacaaagatccaaatttcaaagatcaagtcattttgctgaataagcatattgacgcatacaaaacattcccaccaacagagcctaaaaaggacaaaaagaagaaggctgatgaaactcaagccttaccgcagagacagaagaaacagcaaactgtgactcttcttcctgctgcagatttggatgatttctccaaacaattgcaacaatccatgagcagtgctgactcaactcaggcctaaactcatgcagaccacacaaggcagatgggctatataaacgttttcgcttttccgtttacgatatatagtctactcttgtgcagaatgaattctcgtaactacatagcacaagtagatgtagttaactttaatctcacatagcaatctttaatcagtgtgtaacattagggaggacttgaaagagccaccacattttcaccgaggccacgcggagtacgatcgagtgtacagtgaacaatgctagggagagctgcctatatggaagagccctaatgtgtaaaattaattttagtagtgctatccccatgtgattttaatagcttcttaggagaatgacaaaaaaaaaaaaaaaaaaaaaaaaaaaaaaaaaaaaaaaaaaaaaaaaaaaaaaaaaaagggtcggcatggcatctccacctcctcgcggtccgacctgggcatccgaaggaggacgcacgtccactcggatggctaagggagcagcacactggcggccgttactagggccgcgcccttcccaacagttgcgcagcctgaatggcgaatggagatccaatttttaagtgtataatgtgttaaactactgattctaattgtttgtgtattttagattcacagtcccaaggctcatttcaggcccctcagtcctcacagtctgttcatgatcataatcagccataccacatttgtagaggttttacttgctttaaaaaacctcccacacctccccctgaacctgaaacataaaatgaatgcaattgttgttgttaacttgtttattgcagcttataatggttacaaataaagcaatagcatcacaaatttcacaaataaagcatttttttcactgcattctagttgtggtttgtccaaactcatcaatgtatcttaaagcttgagtattctatagtctcacctaaatagcttggcgtaatcatggtcatagctgtttcctgtgtgaaattgttatccgctcacaattccacacaacatacgagccggaagcataaagtgtaaagcctggggtgcctaatgagtgagctaactcacattaattgcgttgcgctcactgcccgctttccagtcgggaaacctgtcgtgccagctgcattaatgaatcggccaacgcgaaccccttgcggccgcccgggccgtcgaccaattctcatgtttgacagcttatcatcgaatttctgccattcatccgcttattatcacttattcaggcgtagcaaccaggcgtttaagggcaccaataactgccttaaaaaaattacgccccgccctgccactcatcgcagtactgttgtaattcattaagcattctgccgacatggaagccatcacaaacggcatgatgaacctgaatcgccagcggcatcagcaccttgtcgccttgcgtataatatttgcccatggtgaaaacgggggcgaagaagttgtccatattggccacgtttaaatcaaaactggtgaaactcacccagggattggctgagacgaaaaacatattctcaataaaccctttagggaaataggccaggttttcaccgtaacacgccacatcttgcgaatatatgtgtagaaactgccggaaatcgtcgtggtattcactccagagcgatgaaaacgtttcagtttgctcatggaaaacggtgtaacaagggtgaacactatcccatatcaccagctcaccgtctttcattgccatacgaaattccggatgagcattcatcaggcgggcaagaatgtgaataaaggccggataaaacttgtgcttatttttctttacggtctttaaaaaggccgtaatatccagctgaacggtctggttataggtacattgagcaactgactgaaatgcctcaaaatgttctttacgatgccattgggatatatcaacggtggtatatccagtgatttttttctccattttagcttccttagctcctgaaaatctcgataactcaaaaaatacgcccggtagtgatcttatttcattatggtgaaagttggaacctcttacgtgccgatcaacgtctcattttcgccaaaagttggcccagggcttcccggtatcaacagggacaccaggatttatttattctgcgaagtgatcttccgtcacaggtatttattcgcgataagctcatggagcggcgtaaccgtcgcacaggaaggacagagaaagcgcggatctgggaagtgacggacagaacggtcaggacctggattggggaggcggttgccgccgctgctgctgacggtgtgacgttctctgttccggtcacaccacatacgttccgccattcctatgcgatgcacatgctgtatgccggtataccgctgaaagttctgcaaagcctgatgggacataagtccatcagttcaacggaagtctacacgaaggtttttgcgctggatgtggctgcccggcaccgggtgcagtttgcgatgccggagtctgatgcggttgcgatgctgaaacaattatcctgagaataaatgccttggcctttatatggaaatgtggaactgagtggatatgctgtttttgtctgttaaacagagaagctggctgttatccactgagaagcgaacgaaacagtcgggaaaatctcccattatcgtagagatccgcattattaatctcaggagcctgtgtagcgtttataggaagtagtgttctgtcatgatgcctgcaagcggtaacgaaaacgatttgaatatgccttcaggaacaatagaaatcttcgtgcggtgttacgttgaagtggagcggattatgtcagcaatggacagaacaacctaatgaacacagaaccatgatgtggtctgtccttttacagccagtagtgctcgccgcagtcgagcgacagggcgaagccctcggctggttgccctcgccgctgggctggcggccgtctatggccctgcaaacgcgccagaaacgccgtcgaagccgtgtgcgagacaccgcggccggccgccggcgttgtggatacctcgcggaaaacttggccctcactgacagatgaggggcggacgttgacacttgaggggccgactcacccggcgcggcgttgacagatgaggggcaggctcgatttcggccggcgacgtggagctggccagcctcgcaaatcggcgaaaacgcctgattttacgcgagtttcccacagatgatgtggacaagcctggggataagtgccctgcggtattgacacttgaggggcgcgactactgacagatgaggggcgcgatccttgacacttgaggggcagagtgctgacagatgaggggcgcacctattgacatttgaggggctgtccacaggcagaaaatccagcatttgcaagggtttccgcccgtttttcggccaccgctaacctgtcttttaacctgcttttaaaccaatatttataaaccttgtttttaaccagggctgcgccctgtgcgcgtgaccgcgcacgccgaaggggggtgcccccccttctcgaaccctcccggtcgagtgagcgaggaagcaccagggaacagcacttatatattctgcttacacacgatgcctgaaaaaacttcccttggggttatccacttatccacggggatatttttataattattttttttatagtttttagatcttcttttttagagcgccttgtaggcctttatccatgctggttctagagaaggtgttgtgacaaattgccctttcagtgtgacaaatcaccctcaaatgacagtcctgtctgtgacaaattgcccttaaccctgtgacaaattgccctcagaagaagctgttttttcacaaagttatccctgcttattgactcttttttatttagtgtgacaatctaaaaacttgtcacacttcacatggatctgtcatggcggaaacagcggttatcaatcacaagaaacgtaaaaatagcccgcgaatcgtccagtcaaacgacctcactgaggcggcatatagtctctcccgggatcaaaaacgtatgctgtatctgttcgttgaccagatcagaaaatctgatggcaccctacaggaacatgacggtatctgcgagatccatgttgctaaatatgctgaaatattcggattgacctctgcggaagccagtaaggatatacggcaggcattgaagagtttcgcggggaaggaagtggttttttatcgccctgaagaggatgccggcgatgaaaaaggctatgaatcttttccttggtttatcaaacgtgcgcacagtccatccagagggctttacagtgtacatatcaacccatatctcattcccttctttatcgggttacagaaccggtttacgcagtttcggcttagtgaaacaaaagaaatcaccaatccgtatgccatgcgtttatacgaatccctgtgtcagtatcgtaagccggatggctcaggcatcgtctctctgaaaatcgactggatcatagagcgttaccagctgcctcaaagttaccagcgtatgcctgacttccgccgccgcttcctgcaggtctgtgttaatgagatcaacagcagaactccaatgcgcctctcatacattgagaaaaagaaaggccgccagacgactcatatcgtattttccttccgcgatatcacttccatgacgacaggatagtctgagggttatctgtcacagatttgagggtggttcgtcacatttgttctgacctactgagggtaatttgtcacagttttgctgtttccttcagcctgcatggattttctcatactttttgaactgtaatttttaaggaagccaaatttgagggcagtttgtcacagttgatttccttctctttcccttcgtcatgtgacctgatatcgggggttagttcgtcatcattgatgagggttgattatcacagtttattactctgaattggctatccgcgtgtgtacctctacctggagtttttcccacggtggatatttcttcttgcgctgagcgtaagagctatctgacagaacagttcttctttgcttcctcgccagttcgctcgctatgctcggttacacggctgcggcg

SEQ ID NO: 2 - DNA, 35283 bp, Artificial Sequence
  Clone pCCI-4K-SARS-CoV-2-DDDDW. Based on SARS-CoV-2.
gatgtgctgcaaggcgattaagttgggtaacgccagggttttcccagtcacgacgttgtaaaacgacggccagtgaattgtaatacgactcactatagggcgaattctagttattaatagtaatcaattacggggtcattagttcatagcccatatatggagttccgcgttacataacttacggtaaatggcccgcctggctgaccgcccaacgacccccgcccattgacgtcaataatgacgtatgttcccatagtaacgccaatagggactttccattgacgtcaatgggtggagtatttacggtaaactgcccacttggcagtacatcaagtgtatcatatgccaagtacgccccctattgacgtcaatgacggtaaatggcccgcctggcattatgcccagtacatgaccttatgggactttcctacttggcagtacatctacgtattagtcatcgctattaccatggtgatgcggttttggcagtacatcaatgggcgtggatagcggtttgactcacggggatttccaagtctccaccccattgacgtcaatgggagtttgttttggcaccaaaatcaacgggactttccaaaatgtcgtaacaactccgccccattgacgcaaatgggcggtaggcgtgtacggtgggaggtctatataagcagagctggtttagtgaaccgtattaaaggtttataccttcccaggtaacaaaccaaccaactttcgatctcttgtagatctgttctctaaacgaactttaaaatctgtgtggctgtcactcggctgcatgcttagtgcactcacgcagtataattaataactaattactgtcgttgacaggacacgagtaactcgtctatcttctgcaggctgcttacggtttcgtccgtgttgcagccgatcatcagcacatctaggtttcgtccgggtgtgaccgaaaggtaagatggagagccttgtccctggtttcaacgagaaaacacacgtccaactcagtttgcctgttttacaggttcgcgacgtgctcgtacgtggctttggagactccgtggaggaggtcttatcagaggcacgtcaacatcttaaagatggcacttgtggcttagtagaagttgaaaaaggcgttttgcctcaacttgaacagccctatgtgttcatcaaacgttcggatgctcgaactgcacctcatggtcatgttatggttgagctggtagcagaactcgaaggcattcagtacggtcgtagtggtgagacacttggtgtccttgtccctcatgtgggcgaaataccagtggcttaccgcaaggttcttcttcgtaagaacggtaataaaggagctggtggccatagttacggcgccgatctaaagtcatttgacttaggcgacgagcttggcactgatccttatgaagattttcaagaaaactggaacactaaacatagcagtggtgttacccgtgaactcatgcgtgagcttaacggaggggcatacactcgctatgtcgataacaacttctgtggccctgatggctaccctcttgagtgcattaaagaccttctagcacgtgctggtaaagcttcatgcactttgtccgaacaactggactttattgacactaagaggggtgtatactgctgccgtgaacatgagcatgaaattgcttggtacacggaacgttctgaaaagagctatgaattgcagacaccttttgaaattaaattggcaaagaaatttgacaccttcaatggggaatgtccaaattttgtatttcccttaaattccataatcaagactattcaaccaagggttgaaaagaaaaagcttgatggctttatgggtagaattcgatctgtctatccagttgcgtcaccaaatgaatgcaaccaaatgtgcctttcaactctcatgaagtgtgatcattgtggtgaaacttcatggcagacgggcgattttgttaaagccacttgcgaattttgtggcactgagaatttgactaaagaaggtgccactacttgtggttacttaccccaaaatgctgttgttaaaatttattgtccagcatgtcacaattcagaagtaggacctgagcatagtcttgccgaataccataatgaatctggcttgaaaaccattcttcgtaagggtggtcgcactattgcctttggaggctgtgtgttctcttatgttggttgccataacaagtgtgcctattgggtcccgcgtgcgagtgcgaacataggttgtaatcatacgggtgtagtaggtgaaggttcggaaggtctaaatgataatctactagaaatactacaaaaagaaaaagtaaatataaatatagtaggtgattttaaactaaatgaagaaatagcgataatattagcgtcgttttcggcgtcgacgagtgcgtttgtagaaacggtaaaaggtttagattataaagcgtttaaacaaatagtagaatcgtgtggtaattttaaagtgacgaaaggtaaagcgaaaaaaggtgcgtggaatataggtgaacaaaaatcgatactaagtccgctatatgcgtttgcgtcggaagcggcgcgtgtagtacgttcgatattttcgcgtacgctagaaacggcgcaaaattcggtacgtgtattacaaaaagcggcgataacgatactagatggtatatcgcaatattcgctacgtctaatagatgcgatgatgtttacgtcggatttagcgacgaataatctagtagtaatggcgtatataacgggtggtgtagtacaattaacgtcgcaatggctaacgaatatatttggtacggtatatgaaaaactaaaaccggtactagattggctagaagaaaaatttaaagaaggtgtagaatttctacgtgatggttgggaaatagtaaaatttatatcgacgtgtgcgtgtgaaatagtaggtggtcaaatagtaacgtgtgcgaaagaaataaaagaatcggtacaaacgttttttaaactagtaaataaatttctagcgctatgtgcggattcgataataataggtggtgcgaaactaaaagcgctaaatctaggtgaaacgtttgtgacgcattcgaaaggtttatatcgtaaatgtgtaaaatcgcgtgaagaaacgggtctactaatgccgctaaaagcgccgaaagaaataatatttttagaaggtgaaacgctaccgacggaagtattaacggaagaagtagtattaaaaacgggtgatttacaaccgttagaacaaccgacgtcggaagcggtagaagcgccgttagtaggtacgccggtatgtataaatggtctaatgttactagaaataaaagatacggaaaaatattgtgcgctagcgccgaatatgatggtaacgaataatacgtttacgctaaaaggtggtgcgccgacgaaagtaacgtttggtgatgatacggtaatagaagtacaaggttataaatcggtaaatataacgtttgaactagatgaacgtatagataaagtactaaatgaaaaatgttcggcgtatacggtagaactaggtacggaagtaaatgaatttgcgtgtgtagtagcggatgcggtaataaaaacgttacaaccggtatcggaattactaacgccgctaggtatagatttagatgaatggtcgatggcgacgtattatttatttgatgaatcgggtgaatttaaattagcgtcgcatatgtattgttcgttttatccgccggatgaagatgaagaagaaggtgattgtgaagaagaagaatttgaaccgtcgacgcaatatgaatatggtacggaagatgattatcaaggtaaaccgttagaatttggtgcgacgtcggcggcgctacaaccggaagaagaacaagaagaagattggttggatgatgattcgcaacaaacggtaggtcaacaagatggttcggaagataatcaaacgacgacgatacaaacgatagtagaagtacaaccgcaattagaaatggaactaacgccggtagtacaaacgatagaagtaaattcgttttcgggttatttaaaactaacggataatgtatatataaaaaatgcggatatagtagaagaagcgaaaaaagtaaaaccgacggtagtagtaaatgcggcgaatgtatatctaaaacatggtggtggtgtagcgggtgcgttaaataaagcgacgaataatgcgatgcaagtagaatcggatgattatatagcgacgaatggtccgctaaaagtaggtggttcgtgtgtattatcgggtcataatctagcgaaacattgtctacatgtagtaggtccgaatgtaaataaaggtgaagatatacaactactaaaatcggcgtatgaaaattttaatcaacatgaagtactactagcgccgttattatcggcgggtatatttggtgcggacccgatacattcgttacgtgtgtgtgtagatacggtacgcacgaatgtatatttagcggtatttgataaaaatctatatgataaactagtatcgtcgtttttagaaatgaaatcggaaaaacaagtagaacaaaaaatagcggaaataccgaaagaagaagtaaaaccgtttataacggaatcgaaaccgtcggtagaacaacgtaaacaagatgataaaaaaataaaagcgtgtgtagaagaagtaacgacgacgctagaagaaacgaaatttctaacagaaaatttattactatatatagatataaatggtaatctacatccggattcggcgacgctagtatcggatatagatataacgtttttaaaaaaagatgcgccgtatatagtaggtgatgtagtacaagaaggtgtattaacggcggtagtaataccgacgaaaaaagcgggtggtacgacggaaatgctggcgaaagcgttacgtaaagtaccgacggataattatataacgacgtacccgggtcaaggtttaaatggttatacggtagaagaagcgaaaacggtactaaaaaaatgtaaatcggcgttttatatactaccgtcgataatatcgaatgaaaaacaagaaatactaggtacggtatcgtggaatttacgtgaaatgctagcgcatgcggaagaaacacgtaaattaatgccggtatgtgtagaaacgaaagcgatagtatcgacgatacaacgtaaatataaaggtataaaaatacaagaaggtgtagtagattatggtgcgcgtttttatttttatacgtcgaaaacgacggtagcgtcgctaataaatacgctaaatgatctaaatgaaacgctagtaacgatgccgctaggttatgtaacgcatggtttaaatttagaagaagcggcgcgttatatgcgttcgctaaaagtaccggcgacggtatcggtatcgtcgccggatgcggtaacggcgtataatggttatctaacgtcgtcgtcgaaaacgccggaagaacattttatagaaacgatatcgctagcgggttcgtataaagattggtcgtattcgggtcaatcgacgcaactaggtatagaatttctaaaacgtggtgataaatcggtatattatacgtcgaatccgacgacgtttcatctagatggtgaagtaataacgtttgataatctaaaaacgctactatcgttacgtgaagtacgtacgataaaagtatttacgacggtagataatataaatctacatacgcaagtagtagatatgtcgatgacatatggacaacaatttggtccgacgtatttagatggtgcggatgttacgaaaataaaaccgcataattcgcatgaaggtaaaacgttttatgtattaccgaatgatgatacgctacgtgtagaagcgtttgaatattatcatacgactgatccgtcgtttctaggtcgttatatgtcggcgttaaatcatacgaaaaaatggaaatatccgcaagtaaatggtttaacgtcgataaaatgggcggataataattgttatctagcgacggcgttattaacgctacaacaaatagaattaaaatttaatccgccggcgctacaagatgcgtattatcgtgcgcgtgcgggtgaagcggcgaatttttgtgcgctaatattagcgtattgtaataaaacggtaggtgaattaggtgatgtacgtgaaacgatgtcgtatttatttcaacatgcgaatttagattcgtgtaaacgtgtattaaatgtagtatgtaaaacgtgtggtcaacaacaaacgacgctaaaaggtgtagaagcggtaatgtatatgggtacgctatcgtatgaacaatttaaaaaaggtgtacaaataccgtgtacgtgtggtaaacaagcgacgaaatatctagtacaacaagaatcgccgtttgtaatgatgtcggcgccgccggcgcaatatgaactaaaacatggtacgtttacgtgtgcgtcggaatatacgggtaattatcaatgtggtcattataaacatataacgtcgaaagaaacgttatattgtatagatggtgcgttacttacgaaatcgtcggaatataaaggtccgataacggatgtattttataaagaaaattcgtatacgacgacgataaaaccggtaacgtataaattagatggtgtagtatgtacggaaatagatccgaaattagataattattataaaaaagataattcgtattttacggaacaaccgatagatctagtaccgaatcaaccatatccgaatgcgtcgtttgataattttaaatttgtatgtgataatataaaatttgcggatgatttaaatcaattaacgggttataaaaaaccggcgtcgcgtgaactaaaagtaacgttttttccggatttaaatggtgatgtagtagcgatagattataaacattatacgccgtcgtttaaaaaaggtgcgaaattattacataaaccgatagtatggcatgtaaataatgcgacgaataaagcgacgtataaaccgaatacgtggtgtatacggtgtctatggagcacgaaaccggtagaaacgtcgaattcgtttgatgtactaaaatcggaagatgcgcaaggtatggataatctagcgtgtgaagatctaaaaccggtatcggaagaagtagtagaaaatccgacgatacaaaaagatgtactggaatgtaatgtaaaaacgacggaagtagtaggtgatataatactaaaaccggctaataattcgttaaaaataacggaagaagtaggtcatacggatctaatggcggcgtatgtagataattcgtcgctaacgataaaaaaaccgaatgaattatcgcgtgtattaggtttaaaaacgctagcgacgcatggtttagctgctgtaaattcggtaccgtgggatacgatagcgaattatgcgaaaccgtttctaaataaagtagtatcgacgacgacgaatatagtaacgcgatgtttaaatcgtgtatgtacgaattatatgccgtatttttttacgttattactacaattatgtacgtttacgcgatcgacgaattcgcgtataaaagcgtcgatgccgacgacgatagcgaaaaatacggtaaaatcggtaggtaaattttgtctagaagcgtcgtttaattatttaaaatcgccgaatttttctaaactaataaatataataatatggtttttactattatcggtatgcctaggttcgttaatatattcgacggcggcgttaggtgtattaatgtcgaatttaggtatgccgtcgtattgtacgggttatcgtgaaggttatttaaattcgacgaatgtaacgatagcgacgtattgtacgggttcgataccgtgttcggtatgtctatcgggtttagattcgttagatacgtatccgtcgttagaaacgatacaaataacgatatcgtcgtttaaatgggatttaacggcgtttggtttagtagcggaatggtttttagcgtatatactatttacgcgatttttttatgtactaggtttagcggcgataatgcaattatttttttcgtattttgcggtacattttatttcgaattcgtggctaatgtggttaataataaatctagtacaaatggcgccgatatcggcgatggtacgtatgtatatattttttgcgtcgttttattatgtatggaaatcgtatgtacatgtagtagatggttgtaattcgtcgacgtgtatgatgtgttataaacgtaatcgtgcgacgcgagtagaatgtacgacgatagtaaatggtgtacgtcgttcgttttatgtatatgcgaatggtggtaaaggtttttgtaaactacataattggaattgtgtaaattgtgatacgttttgtgcgggttcgacgtttatatcggatgaagtagcgcgtgatttatcgctacaatttaaacgtccgataaatccgacggatcaatcgtcgtatatagtagattcggtaacggtaaaaaatggttcgatacatctatattttgataaagcgggtcaaaaaacgtatgaacgtcattcgctatcgcattttgtaaatttagataatctacgtgcgaataatacgaaaggttcgttaccgataaatgtaatagtatttgatggtaaatcgaaatgtgaagaatcgtcggcgaaatcggcgtcggtatattattcgcaactaatgtgtcaaccgatactattactagatcaagcgttagtatcggatgtaggtgattcggcggaagtagcggtaaaaatgtttgatgcgtatgtaaatacgttttcgtcgacgtttaatgtaccgatggaaaaactaaaaacgctagtagcgacggcggaagcggaactagcgaaaaatgtatctttagataatgtattatcgacgtttatatcggcggcgcgtcaaggttttgtagattcggatgtagaaacgaaagatgtagtagaatgtctaaaattatcgcatcaatcggatatagaagtaacgggtgattcgtgtaataattatatgctaacgtataataaagtagaaaatatgacgccgcgtgatctaggtgcgtgtatagattgttcggcgcgtcatataaatgcgcaagtagcgaaatcgcataatatagcgttaatatggaatgtaaaagattttatgtcgttatcggaacaactacgtaaacaaatacgttcggcggcgaaaaaaaataatttaccgtttaaattaacgtgtgcgacgacgcgacaagtagtaaatgtagtaacgacgaaaatagcgctaaaaggtggtaaaatagtaaataattggttaaaacaattaattaaagtaacgctagtatttctatttgtagcggcgatattttatttaataacgccggtacatgtaatgtcgaaacatacggatttttcgtcggaaataataggttataaagcgatagatggtggtgtaactcgtgatatagcgtcgacggatacgtgttttgcgaataaacatgcggattttgatacgtggttttcgcaacgtggtggttcgtatacgaatgataaagcgtgtccgttaatagcggcggtaataacacgtgaagtaggttttgtagtaccgggtttaccgggtacgatattacgtacgacgaatggtgattttttacattttttaccgcgtgtattttcggcggtaggtaatatatgttatacgccgtcgaaactaatagaatatacggattttgcgacgtcggcgtgtgtattagcggcggaatgtacgatatttaaagatgcgtcgggtaaaccggtaccgtattgttatgatacgaatgtactagaaggttcggtagcgtatgaatcgttacgcccggatacacgttatgtactaatggatggttcgataatacaatttccgaatacgtatctagaaggttcggtacgtgtagtaacgacgtttgattcggaatattgtcgtcatggtacgtgtgaacgttcggaagcgggtgtatgtgtatcgacgtcggggcgttgggtactaaataatgattattatcgttcgttaccgggtgtattctgtggtgtagatgcggtaaatttactaacgaatatgtttacgccgctgatacaaccgataggtgcgttagatatatcggcgtcgatagtagcgggtggtatagtagcgatagtagtaacgtgtctagcgtattattttatgcgttttcgtcgtgcgtttggtgaatattcgcatgtagtagcgtttaatacgttactatttctaatgtcttttacagtactatgtttaacgccggtatattcttttttaccgggtgtatattcggtaatatatttatatttaacgttttatctaacgaatgatgtatcgtttttagcgcatatacaatggatggtaatgtttacgccgttagtaccgttttggataacaatagcgtatataatatgtatatcgacgaaacatttttattggtttttttcgaattatctgaaacgtcgtgtagtatttaatggtgtatctttttcgacgtttgaagaagcggcgctatgtacatttttattaaataaagaaatgtatctaaaattacgttcggatgtactattaccgctaacgcaatataatcgttatttagcgctatataataaatataaatatttttcgggtgcgatggatacgacgtcgtatcgtgaagcggcgtgttgtcatctagcgaaagcgctaaatgatttttcgaattcgggttcggatgtactatatcaaccgccgcaaacgtcgataacgtcggcggtattacaatcgggttttcgtaaaatggcgtttccgtcgggtaaagtagaaggttgtatggtacaagtaacgtgtggtacgacgacgctaaatggtctatggctagatgatgtagtatattgtccgcgtcatgtaatatgtacgtcggaagatatgctaaatccgaattatgaagatttactaatacgtaaatcgaatcataattttttagtacaagcgggtaatgtacaactacgtgtaataggtcattcgatgcaaaattgtgtactaaaactaaaagtagatacggcgaatccgaaaacaccgaaatataaatttgtacgtatacaaccgggtcaaacgttttcggtattagcgtgttataatggttctccgtcgggtgtatatcaatgtgcgatgcgtccgaattttacgattaaaggttcgtttctaaatggttcgtgtggttcggtaggttttaatatagattatgattgtgtatcgttttgttatatgcatcatatggaattaccgacgggtgtacatgcgggtacggatttagaaggtaatttttatggtccgtttgtagatcgtcaaacagcgcaagcggcgggtacggatacgacgattacggtaaatgtattagcgtggttatatgcggcggtaataaatggtgatcgttggtttctaaatcgttttacgacgacgctaaatgattttaatctagtagcgatgaaatataattatgaaccgctgacacaagatcatgtagatatactaggtccgctatcggcgcaaacgggtatagcggtattagatatgtgtgcgtcgttaaaagaattactacaaaatggtatgaatggtcgtacgatattaggttcggcgttattagaagatgaatttacgccgtttgatgtagtacgtcaatgttcgggtgtaacgtttcaatcggcggtaaaacgtacgataaaaggtacgcatcattggttattactaacgatattaacgtcgctattagtattagtacaatcgacgcaatggtcgttatttttttttttatatgaaaatgcgtttttaccgtttgcgatgggtataatagcgatgtcggcgtttgcgatgatgtttgtaaaacataagcatgcatttctctgtttgtttttgttaccttctcttgccactgtagcttattttaatatggtctatatgcctgctagttgggtgatgcgtattatgacatggttggatatggttgatactagtttgtctggttttaagctaaaagactgtgttatgtatgcatcagctgtagtgttactaatccttatgacagcaagaactgtgtatgatgatggtgctaggagagtgtggacacttatgaatgtcttgacactcgtttataaagtttattatggtaatgctttagatcaagccatttccatgtgggctcttataatctctgttacttctaactactcaggtgtagttacaactgtcatgtttttggccagaggtattgtttttatgtgtgttgagtattgccctattttcttcataactggtaatacacttcagtgtataatgctagtttattgtttcttaggctatttttgtacttgttactttggcctcttttgtttactcaaccgctactttagactgactcttggtgtttatgattacttagtttctacacaggagtttagatatatgaattcacagggactactcccacccaagaatagcatagatgccttcaaactcaacattaaattgttgggtgttggtggcaaaccttgtatcaaagtagccactgtacagtctaaaatgtcagatgtaaagtgcacatcagtagtcttactctcagttttgcaacaactcagagtagaatcatcatctaaattgtgggctcaatgtgtccagttacacaatgacattctcttagctaaagatactactgaagcctttgaaaaaatggtttcactactttctgttttgctttccatgcagggtgctgtagacataaacaagctttgtgaagaaatgctggacaacagggcaaccttacaagctatagcctcagagtttagttcccttccatcatatgcagcttttgctactgctcaagaagcttatgagcaggctgttgctaatggtgattctgaagttgttcttaaaaagttgaagaagtctttgaatgtggctaaatctgaatttgaccgtgatgcagccatgcaacgtaagttggaaaagatggctgatcaagctatgacccaaatgtataaacaggctagatctgaggacaagagggcaaaagttactagtgctatgcagacaatgcttttcactatgcttagaaagttggataatgatgcactcaacaacattatcaacaatgcaagagatggttgtgttcccttgaacataatacctcttacaacagcagccaaactaatggttgtcataccagactataacacatataaaaatacgtgtgatggtacaacatttacttatgcatcagcattgtgggaaatccaacaggttgtagatgcagatagtaaaattgttcaacttagtgaaattagtatggacaattcacctaatttagcatggcctcttattgtaacagctttaagggccaattctgctgtcaaattacagaataatgagcttagtcctgttgcactacgacagatgtcttgtgctgccggtactacacaaactgcttgcactgatgacaatgcgttagcttactacaacacaacaaagggaggtaggtttgtacttgcactgttatccgatttacaggatttgaaatgggctagattccctaagagtgatggaactggtactatctatacagaactggaaccaccttgtaggtttgttacagacacacctaaaggtcctaaagtgaagtatttatactttattaaaggattaaacaacctaaatagaggtatggtacttggtagtttagctgccacagtacgtctacaagctggtaatgcaacagaagtgcctgccaattcaactgtattatctttctgtgcttttgctgtagatgctgctaaagcttacaaagattatctagctagtgggggacaaccaatcactaattgtgttaagatgttgtgtacacacactggtactggtcaggcaataacagttacaccggaagccaatatggatcaagaatcctttggtggtgcatcgtgttgtctgtactgccgttgccacatagatcatccaaatcctaaaggattttgtgacttaaaaggtaagtatgtacaaatacctacaacttgtgctaatgaccctgtgggttttacacttaaaaacacagtctgtaccgtctgcggtatgtggaaaggttatggctgtagttgtgatcaactccgcgaacccatgcttcagtcagctgatgcacaatcgtttttaaacgggtttgcggtgtaagtgcagcccgtcttacaccgtgcggcacaggcactagtactgatgtcgtatacagggcttttgacatctacaatgataaagtagctggttttgctaaattcctaaaaactaattgttgtcgcttccaagaaaaggacgaagatgacaatttaattgattcttactttgtagttaagagacacactttctctaactaccaacatgaagaaacaatttataatttacttaaggattgtccagctgttgctaaacatgacttctttaagtttagaatagacggtgacatggtaccacatatatcacgtcaacgtcttactaaatacacaatggcagacctcgtctatgctttaaggcattttgatgaaggtaattgtgacacattaaaagaaatacttgtcacatacaattgttgtgatgatgattatttcaataaaaaggactggtatgattttgtagaaaacccagatatattacgcgtatacgccaacttaggtgaacgtgtacgccaagctttgttaaaaacagtacaattctgtgatgccatgcgaaatgctggtattgttggtgtactgacattagataatcaagatctcaatggtaactggtatgatttcggtgatttcatacaaaccacgccaggtagtggagttcctgttgtagattcttattattcattgttaatgcctatattaaccttgaccagggctttaactgcagagtcacatgttgacactgacttaacaaagccttacattaagtgggatttgttaaaatatgacttcacggaagagaggttaaaactctttgaccgttattttaaatattgggatcagacataccacccaaattgtgttaactgtttggatgacagatgcattctgcattgtgcaaactttaatgttttattctctacagtgttcccacctacaagttttggaccactagtgagaaaaatatttgttgatggtgttccatttgtagtttcaactggataccacttcagagagctaggtgttgtacataatcaggatgtaaacttacatagctctagacttagttttaaggaattacttgtgtatgctgctgaccctgctatgcacgctgcttctggtaatctattactagataaacgcactacgtgcttttcagtagctgcacttactaacaatgttgcttttcaaactgtcaaacccggtaattttaacaaagacttctatgactttgctgtgtctaagggtttctttaaggaaggaagttctgttgaattaaaacacttcttctttgctcaggatggtaatgctgctatcagcgattatgactactatcgttataatctaccaacaatgtgtgatatcagacaactactatttgtagttgaagttgttgataagtactttgattgttacgatggtggctgtattaatgctaaccaagtcatcgtcaacaacctagacaaatcagctggttttccatttaataaatggggtaaggctagactttattatgattcaatgagttatgaggatcaagatgcacttttcgcatatacaaaacgtaatgtcatccctactataactcaaatgaatcttaagtatgccattagtgcaaagaatagagctcgcaccgtagctggtgtctctatctgtagtactatgaccaatagacagtttcatcaaaaattattgaaatcaatagccgccactagaggagctactgtagtaattggaacaagcaaattctatggtggttggcacaacatgttaaaaactgtttatagtgatgtagaaaaccctcaccttatgggttgggattatcctaaatgtgatagagccatgcctaacatgcttagaattatggcctcacttgttcttgctcgcaaacatacaacgtgttgtagcttgtcacaccgtttctatagattagctaatgagtgtgctcaagtattgagtgaaatggtcatgtgtggcggttcactatatgttaaaccaggtggaacctcatcaggagatgccacaactgcttatgctaatagtgtttttaacatttgtcaagctgtcacggccaatgttaatgcacttttatctactgatggtaacaaaattgccgataagtatgtccgcaatttacaacacagactttatgagtgtctctatagaaatagagatgttgacacagactttgtgaatgagttttacgcatatttgcgtaaacatttctcaatgatgatactctctgacgatgctgttgtgtgtttcaatagcacttatgcatctcaaggtctagtggctagcataaagaactttaagtcagttctttattatcaaaacaatgtttttatgtctgaagcaaaatgttggactgagactgaccttactaaaggacctcatgaattttgctctcaacatacaatgctagttaaacagggtgatgattatgtgtaccttccttacccagatccatcaagaatcctaggggccggctgttttgtagatgatatcgtaaaaacagatggtacacttatgattgaacggttcgtgtctttagctatagatgcttacccacttactaaacatcctaatcaggagtatgctgatgtctttcatttgtacttacaatacataagaaagctacatgatgagttaacaggacacatgttagacatgtattctgttatgcttactaatgataacacttcaaggtattgggaacctgagttttatgaggctatgtacacaccgcatacagtcttacaggctgttggggcttgtgttctttgcaattcacagacttcattaagatgtggtgcttgcatacgtagaccattcttatgttgtaaatgctgttacgaccatgtcatatcaacatcacataaattagtcttgtctgttaatccgtatgtttgcaatgctccaggttgtgatgtcacagatgtgactcaactttacttaggaggtatgagctattattgtaaatcacataaaccacccattagttttccattgtgtgctaatggacaagtttttggtttatataaaaatacatgtgttggtagcgataatgttactgactttaatgcaattgcaacatgtgactggacaaatgctggtgattacattttagctaacacctgtactgaaagactcaagctttttgcagcagaaacgctcaaagctactgaggagacatttaaactgtcttatggtattgctactgtacgtgaagtgctgtctgacagagaattacatctttcatgggaagttggtaaacctagaccaccacttaaccgaaattatgtctttactggttatcgtgtaactaaaaacagtaaagtacaaataggagagtacacctttgaaaaaggtgactatggtgatgctgttgtttaccgaggtacaacaacttacaaattaaatgttggtgattattttgtgctgacatcacatacagtaatgccattaagtgcacctacactagtgccacaagagcactatgttagaattactggcttatacccaacactcaatatctcagatgagttttctagcaatgttgcaaattatcaaaaggttggtatgcaaaagtattctacactccagggaccacctggtactggtaagagtcattttgctattggcctagctctctactacccttctgctcgcatagtgtatacagcttgctctcatgccgctgttgatgcactatgtgagaaggcattaaaatatttgcctatagataaatgtagtagaattatacctgcacgtgctcgtgtagagtgttttgataaattcaaagtgaattcaacattagaacagtatgtcttttgtactgtaaatgcattgcctgagacgacagcagatatagttgtctttgatgaaatttcaatggccacaaattatgatttgagtgttgtcaatgccagattacgtgctaagcactatgtgtacattggcgaccctgctcaattacctgcaccacgcacattgctaactaagggcacactagaaccagaatatttcaattcagtgtgtagacttatgaaaactataggtccagacatgttcctcggaacttgtcggcgttgtcctgctgaaattgttgacactgtgagtgctttggtttatgataataagcttaaagcacataaagacaaatcagctcaatgctttaaaatgttttataagggtgttatcacgcatgatgtttcatctgcaattaacaggccacaaataggcgtggtaagagaattccttacacgtaaccctgcttggagaaaagctgtctttatttcaccttataattcacagaatgctgtagcctcaaagattttgggactaccaactcaaactgttgattcatcacagggctcagaatatgactatgtcatattcactcaaaccactgaaacagctcactcttgtaatgtaaacagatttaatgttgctattaccagagcaaaagtaggcatactttgcataatgtctgatagagacctttatgacaagttgcaatttacaagtcttgaaattccacgtaggaatgtggcaactttacaagctgaaaatgtaacaggactctttaaagattgtagtaaggtaatcactgggttacatcctacacaggcacctacacacctcagtgttgacactaaattcaaaactgaaggtttatgtgttgacatacctggcatacctaaggacatgacctatagaagactcatctctatgatgggttttaaaatgaattatcaagttaatggttaccctaacatgtttatcacccgcgaagaagctataagacatgtacgtgcatggattggcttcgatgtcgaggggtgtcatgctactagagaagctgttggtaccaatttacctttacagctaggtttttctacaggtgttaacctagttgctgtacctacaggttatgttgatacacctaataatacagatttttccagagttagtgctaaaccaccgcctggagatcaatttaaacacctcataccacttatgtacaaaggacttccttggaatgtagtgcgtataaagattgtacaaatgttaagtgacacacttaaaaatctctctgacagagtcgtatttgtcttatgggcacatggctttgagttgacatctatgaagtattttgtgaaaataggacctgagcgcacctgttgtctatgtgatagacgtgccacatgcttttccactgcttcagacacttatgcctgttggcatcattctattggatttgattacgtctataatccgtttatgattgatgttcaacaatggggttttacaggtaacctacaaagcaaccatgatctgtattgtcaagtccatggtaatgcacatgtagctagttgtgatgcaatcatgactaggtgtctagctgtccacgagtgctttgttaagcgtgttgactggactattgaatatcctataattggtgatgaactgaagattaatgcggcttgtagaaaggttcaacacatggttgttaaagctgcattattagcagacaaattcccagttcttcacgacattggtaaccctaaagctattaagtgtgtacctcaagctgatgtagaatggaagttctatgatgcacagccttgtagtgacaaagcttataaaatagaagaattattctattcttatgccacacattctgacaaattcacagatggtgtatgcctattttggaattgcaatgtcgatagatatcctgctaattccattgtttgtagatttgacactagagtgctatctaaccttaacttgcctggttgtgatggtggcagtttgtatgtaaataaacatgcattccacacaccagcttttgataaaagtgcttttgttaatttaaaacaattaccatttttctattactctgacagtccatgtgagtctcatggaaaacaagtagtgtcagatatagattatgtaccactaaagtctgctacgtgtataacacgttgcaatttaggtggtgctgtctgtagacatcatgctaatgagtacagattgtatctcgatgcttataacatgatgatctcagctggctttagcttgtgggtttacaaacaatttgatacttataacctctggaacacttttacaagacttcagagtttagaaaatgtggcttttaatgttgtaaataagggacactttgatggacaacagggtgaagtaccagtttctatcattaataacactgtttacacaaaagttgatggtgttgatgtagaattgtttgaaaataaaacaacattacctgttaatgtagcatttgagctttgggctaagcgcaacattaaaccagtaccagaggtgaaaatactcaataatttgggtgtggacattgctgctaatactgtgatctgggactacaaaagagatgctccagcacatatatctactattggtgtttgttctatgactgacatagccaagaaaccaactgaaacgatttgtgcaccactcactgtcttttttgatggtagagttgatggtcaagtagacttatttagaaatgcccgtaatggtgttcttattacagaaggtagtgttaaaggtttacaaccatctgtaggtcccaaacaagctagtcttaatggagtcacattaattggagaagccgtaaaaacacagttcaattattataagaaagttgatggtgttgtccaacaattacctgaaacttactttactcagagtagaaatttacaagaatttaaacccaggagtcaaatggaaattgatttcttagaattagctatggatgaattcattgaacggtataaattagaaggctatgccttcgaacatatcgtttatggagattttagtcatagtcagttaggtggtttacatctactgattggactagctaaacgttttaaggaatcaccttttgaattagaagattttattcctatggacagtacagttaaaaactatttcataacagatgcgcaaacaggttcatctaagtgtgtgtgttctgttattgatttattacttgatgattttgttgaaataataaaatcccaagatttatctgtagtttctaaggttgtcaaagtgactattgactatacagaaatttcatttatgctttggtgtaaagatggccatgtagaaacattttacccaaaattacaatctagtcaagcgtggcaaccgggtgttgctatgcctaatctttacaaaatgcaaagaatgctattagaaaagtgtgaccttcaaaattatggtgatagtgcaacattacctaaaggcataatgatgaatgtcgcaaaatatactcaactgtgtcaatatttaaacacattaacattagctgtaccctataatatgagagttatacattttggtgctggttctgataaaggagttgcaccaggtacagctgttttaagacagtggttgcctacgggtacgctgcttgtcgattcagatcttaatgactttgtctctgatgcagattcaactttgattggtgattgtgcaactgtacatacagctaataaatgggatctcattattagtgatatgtacgaccctaagactaaaaatgttacaaaagaaaatgactctaaagagggttttttcacttacatttgtgggtttatacaacaaaagctagctcttggaggttccgtggctataaagataacagaacattcttggaatgctgatctttataagctcatgggacacttcgcatggtggacagcctttgttactaatgtgaatgcgtcatcatctgaagcatttttaattggatgtaattatcttggcaaaccacgcgaacaaatagatggttatgtcatgcatgcaaattacatattttggaggaatacaaatccaattcagttgtcttcctattctttatttgacatgagtaaatttccccttaaattaaggggtactgctgttatgtctttaaaagaaggtcaaatcaatgatatgattttatctcttcttagtaaaggtagacttataattagagaaaacaacagagttgttatttctagtgatgttcttgttaacaactaaacgaacaatgtttgtttttcttgttttattgccactagtctctagtcagtgtgttaatcttacaaccagaactcaattaccccctgcatacactaattctttcacacgtggtgtttattaccctgacaaagttttcagatcctcagttttacattcaactcaggacttgttcttacctttcttttccaatgttacttggttccatgctatacatgtctctgggaccaatggtactaagaggtttgataaccctgtcctaccatttaatgatggtgtttattttgcttccactgagaagtctaacataataagaggctggatttttggtactactttagattcgaagacccagtccctacttattgttaataacgctactaatgttgttattaaagtctgtgaatttcaattttgtaatgatccatttttgggtgtttattaccacaaaaacaacaaaagttggatggaaagtgagttcagagtttattctagtgcgaataattgcacttttgaatatgtctctcagccttttcttatggaccttgaaggaaaacagggtaatttcaaaaatcttagggaatttgtgtttaagaatattgatggttattttaaaatatattctaagcacacgcctattaatttagtgcgtgatctcccccagggtttttcggctttagaaccattggtagatttgccaataggtattaacatcactaggtttcaaactttacttgctttacatagaagttatttgactcctggtgattcttcttcaggttggacagctggtgctgcagcttattatgtgggttatcttcaacctaggacttttctattaaaatataatgaaaatggaaccattacagatgctgtagactgtgcacttgaccctctctcagaaacaaagtgtacgttgaaatccttcactgtagaaaaaggaatctatcaaacttctaactttagagtccaaccaacagaatctattgttagatttcctaatattacaaacttgtgcccttttggtgaagtttttaacgccaccagatttgcatctgtttatgcttggaacaggaagagaatcagcaactgtgttgctgattattctgtcctatataattccgcatcattttccacttttaagtgttatggagtgtctcctactaaattaaatgatctctgctttactaatgtctatgcagattcatttgtaattagaggtgatgaagtcagacaaatcgctccagggcaaactggaaagattgctgattataattataaattaccagatgattttacaggctgcgttatagcttggaattctaacaatcttgattctaaggttggtggtaattataattacctgtatagattgtttaggaagtctaatctcaaaccttttgagagagatatttcaactgaaatctatcaggccggtagcacaccttgtaatggtgttgaaggttttaattgttactttcctttacaatcatatggtttccaacccactaatggtgttggttaccaaccatacagagtagtagtactttcttttgaacttctacatgcaccagcaactgtttgtggacctaaaaagtctactaatttggttaaaaacaaatgtgtcaatttcaacttcaatggtttaacaggcacaggtgttcttactgagtctaacaaaaagtttctgcctttccaacaatttggcagagacattgctgacactactgatgctgtccgtgatccacagacacttgagattcttgacattacaccatgttcttttggtggtgtcagtgttataacaccaggaacaaatacttctaaccaggttgctgttctttatcaggatgttaactgcacagaagtccctgttgctattcatgcagatcaacttactcctacttggcgtgtttattctacaggttctaatgtttttcaaacacgtgcaggctgtttaataggggctgaacatgtcaacaactcatatgagtgtgacatacccattggtgcaggtatatgcgctagttatcagactcagactaattctcctcggcgggcacgtagtgtagctagtcaatccatcattgcctacactatgtcacttggtgcagaaaattcagttgcttactctaataactctattgccatacccacaaattttactattagtgttaccacagaaattctaccagtgtctatgaccaagacatcagtagattgtacaatgtacatttgtggtgattcaactgaatgcagcaatcttttgttgcaatatggcagtttttgtacacaattaaaccgtgctttaactggaatagctgttgaacaagacaaaaacacccaagaagtttttgcacaagtcaaacaaatttacaaaacaccaccaattaaagattttggtggttttaatttttcacaaatattaccagatccatcaaaaccaagcaagaggtcatttattgaagatctacttttcaacaaagtgacacttgcagatgctggcttcatcaaacaatatggtgattgccttggtgatattgctgctagagacctcatttgtgcacaaaagtttaacggccttactgttttgccacctttgctcacagatgaaatgattgctcaatacacttctgcactgttagcgggtacaatcacttctggttggacctttggtgcaggtgctgcattacaaataccatttgctatgcaaatggcttataggtttaatggtattggagttacacagaatgttctctatgagaaccaaaaattgattgccaaccaatttaatagtgctattggcaaaattcaagactcactttcttccacagcaagtgcacttggaaaacttcaagatgtggtcaaccaaaatgcacaagctttaaacacgcttgttaaacaacttagctccaattttggtgcaatttcaagtgttttaaatgatatcctttcacgtcttgacaaagttgaggctgaagtgcaaattgataggttgatcacaggcagacttcaaagtttgcagacatatgtgactcaacaattaattagagctgcagaaatcagagcttctgctaatcttgctgctactaaaatgtcagagtgtgtacttggacaatcaaaaagagttgatttttgtggaaagggctatcatcttatgtccttccctcagtcagcacctcatggtgtagtcttcttgcatgtgacttatgtccctgcacaagaaaagaacttcacaactgctcctgccatttgtcatgatggaaaagcacactttcctcgtgaaggtgtctttgtttcaaatggcacacactggtttgtaacacaaaggaatttttatgaaccacaaatcattactacagacaacacatttgtgtctggtaactgtgatgttgtaataggaattgtcaacaacacagtttatgatcctttgcaacctgaattagactcattcaaggaggagttagataaatattttaagaatcatacatcaccagatgttgatttaggtgacatctctggcattaatgcttcagttgtaaacattcaaaaagaaattgaccgcctcaatgaggttgccaagaatttaaatgaatctctcatcgatctccaagaacttggaaagtatgagcagtatataaaatggccatggtacatttggctaggttttatagctggcttgattgccatagtaatggtgacaattatgctttgctgtatgaccagttgctgtagttgtctcaagggctgttgttcttgtggatcctgctgcaaatttgatgaagacgactctgagccagtgctcaaaggagtcaaattacattacacataaacgaacttatggatttgtttatgagaatcttcacaattggaactgtaactttgaagcaaggtgaaatcaaggatgctactccttcagattttgttcgcgctactgcaacgataccgatacaagcctcactccctttcggatggcttattgttggcgttgcacttcttgctgtttttcagagcgcttccaaaatcataaccctcaaaaagagatggcaactagcactctccaagggtgttcactttgtttgcaacttgctgttgttgtttgtaacagtttactcacaccttttgctcgttgctgctggccttgaagccccttttctctatctttatgctttagtctacttcttgcagagtataaactttgtaagaataataatgaggctttggctttgctggaaatgccgttccaaaaacccattactttatgatgccaactattttctttgctggcatactaattgttacgactattgtataccttacaatagtgtaacttcttcaattgtcattacttcaggtgatggcacaacaagtcctatttctgaacatgactaccagattggtggttatactgaaaaatgggaatctggagtaaaagactgtgttgtattacacagttacttcacttcagactattaccagctgtactcaactcaattgagtacagacactggtgttgaacatgttaccttcttcatctacaataaaattgttgatgagcctgaagaacatgtccaaattcacacaatcgacggttcatccggagttgttaatccagtaatggaaccaatttatgatgaaccgacgacgactactagcgtgcctttgtaagcacaagctgatgagtacgaacttatgtactcattcgtttcggaagagacaggtacgttaatagttaatagcgtacttctttttcttgctttcgtggtattcttgctagttacactagccatccttactgcgcttcgattgtgtgcgtactgctgcaatattgttaacgtgagtcttgtaaaaccttctttttacgtttactctcgtgttaaaaatctgaattcttctagagttcctgatcttctggtctaaacgaactaaatattatattagtttttctgtttggaactttaattttagccatggcagattccaacggtactattaccgttgaagagcttaaaaagctccttgaacaatggaacctagtaataggtttcctattccttacatggatttgtcttctacaatttgcctatgccaacaggaataggtttttgtatataattaagttaattttcctctggctgttatggccagtaactttagcttgttttgtgcttgctgctgtttacagaataaattggatcaccggtggaattgctatcgcaatggcttgtcttgtaggcttgatgtggctcagctacttcattgcttctttcagactgtttgcgcgtacgcgatccatgtggtcattcaatccagaaactaacattcttctcaacgtgccactccatggcactattctgaccagaccgcttctagaaagtgaactcgtaatcggagctgtgatccttcgtggacatcttcgtattgctggacaccatctaggacgctgtgacatcaaggacctgcctaaagaaatcactgttgctacatcacgaacgctttcttattacaaattgggagcttcgcagcgtgtagcaggtgactcaggttttgctgcatacagtcgctacaggattggcaactataaattaaacacagaccattccagtagcagtgacaatattgctttgcttgtacagtaagtgacaacagatgtttcatctcgttgactttcaggttactatagcagagatattactaattattatgaggacttttaaagtttccatttggaatcttgattacatcataaacctcataattaaaaatttatctaagtcactaactgagaataaatattctcaattagatgaagagcaaccaatggagattgattaaacgaacatgaaaattattcttttcttggcactgataacactcgctacttgtgagctttatcactaccaagagtgtgttagaggtacaacagtacttttaaaagaaccttgctcttctggaacatacgagggcaattcaccatttcatcctctagctgataacaaatttgcactgacttgctttagcactcaatttgcttttgcttgtcctgacggcgtaaaacacgtctatcagttacgtgccagatcagtttcacctaaactgttcatcagacaagaggaagttcaagaactttactctccaatttttcttattgttgcggcaatagtgtttataacactttgcttcacactcaaaagaaagacagaatgattgaactttcattaattgacttctatttgtgctttttagcctttctgctattccttgttttaattatgcttattatcttttggttctcacttgaactgcaagatcataatgaaacttgtcacgcctaaacgaacatgaaatttcttgttttcttaggaatcatcacaactgtagctgcatttcaccaagaatgtagtttacagtcatgtactcaacatcaaccatatgtagttgatgacccgtgtcctattcacttctattctaaatggtatattagagtaggagctagaaaatcagcacctttaattgaattgtgcgtggatgaggctggttctaaatcacccattcagtacatcgatatcggtaattatacagtttcctgtttaccttttacaattaattgccaggaacctaaattgggtagtcttgtagtgcgttgttcgttctatgaagactttttagagtatcatgacgttcgtgttgttttagatttcatctaaacgaacaaactaaaatgtctgataatggaccccaaaatcagcgaaatgcaccccgcattacgtttggtggaccctcagattcaactggcagtaaccagaatggagaacgcagtggggcgcgatcaaaacaacgtcggccccaaggtttacccaataatactgcgtcttggttcaccgctctcactcaacatggcaaggaagaccttaaattccctcgaggacaaggcgttccaattaacaccaatagcagtccagatgaccaaattggctactaccgaagagctaccagacgaattcgtggtggtgacggtaaaatgaaagatctcagtccaagatggtatttctactacctaggaactgggccagaagctggacttccctatggtgctaacaaagacggcatcatatgggttgcaactgagggagccttgaatacaccaaaagatcacattggcacccgcaatcctgctaacaatgctgcaatcgtgctacaacttcctcaaggaacaacattgccaaaaggcttctacgcagaagggagcagaggcggcagtcaagcctcttctcgttcctcatcacgtagtcgcaacagttcaagaaattcaactccaggcagcagtaggggaacttctcctgctagaatggctggcaatggcggtgatgctgctcttgctttgctgctgcttgacagattgaaccagcttgagagcaaaatgtctggtaaaggccaacaacaacaaggccaaactgtcactaagaaatctgctgctgaggcttctaagaagcctcggcaaaaacgtactgccactaaagcatacaatgtaacacaagctttcggcagacgtggtccagaacaaacccaaggaaattttggggaccaggaactaatcagacaaggaactgattacaaacattggccgcaaattgcacaatttgcccccagcgcttcagcgttcttcggaatgtcgcgcattggcatggaagtcacaccttcgggaacgtggttgacctacacaggtgccatcaaattggatgacaaagatccaaatttcaaagatcaagtcattttgctgaataagcatattgacgcatacaaaacattcccaccaacagagcctaaaaaggacaaaaagaagaaggctgatgaaactcaagccttaccgcagagacagaagaaacagcaaactgtgactcttcttcctgctgcagatttggatgatttctccaaacaattgcaacaatccatgagcagtgctgactcaactcaggcctaaactcatgcagaccacacaaggcagatgggctatataaacgttttcgcttttccgtttacgatatatagtctactcttgtgcagaatgaattctcgtaactacatagcacaagtagatgtagttaactttaatctcacatagcaatctttaatcagtgtgtaacattagggaggacttgaaagagccaccacattttcaccgaggccacgcggagtacgatcgagtgtacagtgaacaatgctagggagagctgcctatatggaagagccctaatgtgtaaaattaattttagtagtgctatccccatgtgattttaatagcttcttaggagaatgacaaaaaaaaaaaaaaaaaaaaaaaaaaaaaaaaaaaaaaaaaaaaaaaaaaaaaaaaaaagggtcggcatggcatctccacctcctcgcggtccgacctgggcatccgaaggaggacgcacgtccactcggatggctaagggagcagcacactggcggccgttactagggccgcgcccttcccaacagttgcgcagcctgaatggcgaatggagatccaatttttaagtgtataatgtgttaaactactgattctaattgtttgtgtattttagattcacagtcccaaggctcatttcaggcccctcagtcctcacagtctgttcatgatcataatcagccataccacatttgtagaggttttacttgctttaaaaaacctcccacacctccccctgaacctgaaacataaaatgaatgcaattgttgttgttaacttgtttattgcagcttataatggttacaaataaagcaatagcatcacaaatttcacaaataaagcatttttttcactgcattctagttgtggtttgtccaaactcatcaatgtatcttaaagcttgagtattctatagtctcacctaaatagcttggcgtaatcatggtcatagctgtttcctgtgtgaaattgttatccgctcacaattccacacaacatacgagccggaagcataaagtgtaaagcctggggtgcctaatgagtgagctaactcacattaattgcgttgcgctcactgcccgctttccagtcgggaaacctgtcgtgccagctgcattaatgaatcggccaacgcgaaccccttgcggccgcccgggccgtcgaccaattctcatgtttgacagcttatcatcgaatttctgccattcatccgcttattatcacttattcaggcgtagcaaccaggcgtttaagggcaccaataactgccttaaaaaaattacgccccgccctgccactcatcgcagtactgttgtaattcattaagcattctgccgacatggaagccatcacaaacggcatgatgaacctgaatcgccagcggcatcagcaccttgtcgccttgcgtataatatttgcccatggtgaaaacgggggcgaagaagttgtccatattggccacgtttaaatcaaaactggtgaaactcacccagggattggctgagacgaaaaacatattctcaataaaccctttagggaaataggccaggttttcaccgtaacacgccacatcttgcgaatatatgtgtagaaactgccggaaatcgtcgtggtattcactccagagcgatgaaaacgtttcagtttgctcatggaaaacggtgtaacaagggtgaacactatcccatatcaccagctcaccgtctttcattgccatacgaaattccggatgagcattcatcaggcgggcaagaatgtgaataaaggccggataaaacttgtgcttatttttctttacggtctttaaaaaggccgtaatatccagctgaacggtctggttataggtacattgagcaactgactgaaatgcctcaaaatgttctttacgatgccattgggatatatcaacggtggtatatccagtgatttttttctccattttagcttccttagctcctgaaaatctcgataactcaaaaaatacgcccggtagtgatcttatttcattatggtgaaagttggaacctcttacgtgccgatcaacgtctcattttcgccaaaagttggcccagggcttcccggtatcaacagggacaccaggatttatttattctgcgaagtgatcttccgtcacaggtatttattcgcgataagctcatggagcggcgtaaccgtcgcacaggaaggacagagaaagcgcggatctgggaagtgacggacagaacggtcaggacctggattggggaggcggttgccgccgctgctgctgacggtgtgacgttctctgttccggtcacaccacatacgttccgccattcctatgcgatgcacatgctgtatgccggtataccgctgaaagttctgcaaagcctgatgggacataagtccatcagttcaacggaagtctacacgaaggtttttgcgctggatgtggctgcccggcaccgggtgcagtttgcgatgccggagtctgatgcggttgcgatgctgaaacaattatcctgagaataaatgccttggcctttatatggaaatgtggaactgagtggatatgctgtttttgtctgttaaacagagaagctggctgttatccactgagaagcgaacgaaacagtcgggaaaatctcccattatcgtagagatccgcattattaatctcaggagcctgtgtagcgtttataggaagtagtgttctgtcatgatgcctgcaagcggtaacgaaaacgatttgaatatgccttcaggaacaatagaaatcttcgtgcggtgttacgttgaagtggagcggattatgtcagcaatggacagaacaacctaatgaacacagaaccatgatgtggtctgtccttttacagccagtagtgctcgccgcagtcgagcgacagggcgaagccctcggctggttgccctcgccgctgggctggcggccgtctatggccctgcaaacgcgccagaaacgccgtcgaagccgtgtgcgagacaccgcggccggccgccggcgttgtggatacctcgcggaaaacttggccctcactgacagatgaggggcggacgttgacacttgaggggccgactcacccggcgcggcgttgacagatgaggggcaggctcgatttcggccggcgacgtggagctggccagcctcgcaaatcggcgaaaacgcctgattttacgcgagtttcccacagatgatgtggacaagcctggggataagtgccctgcggtattgacacttgaggggcgcgactactgacagatgaggggcgcgatccttgacacttgaggggcagagtgctgacagatgaggggcgcacctattgacatttgaggggctgtccacaggcagaaaatccagcatttgcaagggtttccgcccgtttttcggccaccgctaacctgtcttttaacctgcttttaaaccaatatttataaaccttgtttttaaccagggctgcgccctgtgcgcgtgaccgcgcacgccgaaggggggtgcccccccttctcgaaccctcccggtcgagtgagcgaggaagcaccagggaacagcacttatatattctgcttacacacgatgcctgaaaaaacttcccttggggttatccacttatccacggggatatttttataattattttttttatagtttttagatcttcttttttagagcgccttgtaggcctttatccatgctggttctagagaaggtgttgtgacaaattgccctttcagtgtgacaaatcaccctcaaatgacagtcctgtctgtgacaaattgcccttaaccctgtgacaaattgccctcagaagaagctgttttttcacaaagttatccctgcttattgactcttttttatttagtgtgacaatctaaaaacttgtcacacttcacatggatctgtcatggcggaaacagcggttatcaatcacaagaaacgtaaaaatagcccgcgaatcgtccagtcaaacgacctcactgaggcggcatatagtctctcccgggatcaaaaacgtatgctgtatctgttcgttgaccagatcagaaaatctgatggcaccctacaggaacatgacggtatctgcgagatccatgttgctaaatatgctgaaatattcggattgacctctgcggaagccagtaaggatatacggcaggcattgaagagtttcgcggggaaggaagtggttttttatcgccctgaagaggatgccggcgatgaaaaaggctatgaatcttttccttggtttatcaaacgtgcgcacagtccatccagagggctttacagtgtacatatcaacccatatctcattcccttctttatcgggttacagaaccggtttacgcagtttcggcttagtgaaacaaaagaaatcaccaatccgtatgccatgcgtttatacgaatccctgtgtcagtatcgtaagccggatggctcaggcatcgtctctctgaaaatcgactggatcatagagcgttaccagctgcctcaaagttaccagcgtatgcctgacttccgccgccgcttcctgcaggtctgtgttaatgagatcaacagcagaactccaatgcgcctctcatacattgagaaaaagaaaggccgccagacgactcatatcgtattttccttccgcgatatcacttccatgacgacaggatagtctgagggttatctgtcacagatttgagggtggttcgtcacatttgttctgacctactgagggtaatttgtcacagttttgctgtttccttcagcctgcatggattttctcatactttttgaactgtaatttttaaggaagccaaatttgagggcagtttgtcacagttgatttccttctctttcccttcgtcatgtgacctgatatcgggggttagttcgtcatcattgatgagggttgattatcacagtttattactctgaattggctatccgcgtgtgtacctctacctggagtttttcccacggtggatatttcttcttgcgctgagcgtaagagctatctgacagaacagttcttctttgcttcctcgccagttcgctcgctatgctcggttacacggctgcggcg

SEQ ID NO: 3 - DNA, 35283 bp, Artificial Sequence
  Clone pCCI-4K-SARS-CoV-2-DDDWD. Based on SARS-CoV-2.
gatgtgctgcaaggcgattaagttgggtaacgccagggttttcccagtcacgacgttgtaaaacgacggccagtgaattgtaatacgactcactatagggcgaattctagttattaatagtaatcaattacggggtcattagttcatagcccatatatggagttccgcgttacataacttacggtaaatggcccgcctggctgaccgcccaacgacccccgcccattgacgtcaataatgacgtatgttcccatagtaacgccaatagggactttccattgacgtcaatgggtggagtatttacggtaaactgcccacttggcagtacatcaagtgtatcatatgccaagtacgccccctattgacgtcaatgacggtaaatggcccgcctggcattatgcccagtacatgaccttatgggactttcctacttggcagtacatctacgtattagtcatcgctattaccatggtgatgcggttttggcagtacatcaatgggcgtggatagcggtttgactcacggggatttccaagtctccaccccattgacgtcaatgggagtttgttttggcaccaaaatcaacgggactttccaaaatgtcgtaacaactccgccccattgacgcaaatgggcggtaggcgtgtacggtgggaggtctatataagcagagctggtttagtgaaccgtattaaaggtttataccttcccaggtaacaaaccaaccaactttcgatctcttgtagatctgttctctaaacgaactttaaaatctgtgtggctgtcactcggctgcatgcttagtgcactcacgcagtataattaataactaattactgtcgttgacaggacacgagtaactcgtctatcttctgcaggctgcttacggtttcgtccgtgttgcagccgatcatcagcacatctaggtttcgtccgggtgtgaccgaaaggtaagatggagagccttgtccctggtttcaacgagaaaacacacgtccaactcagtttgcctgttttacaggttcgcgacgtgctcgtacgtggctttggagactccgtggaggaggtcttatcagaggcacgtcaacatcttaaagatggcacttgtggcttagtagaagttgaaaaaggcgttttgcctcaacttgaacagccctatgtgttcatcaaacgttcggatgctcgaactgcacctcatggtcatgttatggttgagctggtagcagaactcgaaggcattcagtacggtcgtagtggtgagacacttggtgtccttgtccctcatgtgggcgaaataccagtggcttaccgcaaggttcttcttcgtaagaacggtaataaaggagctggtggccatagttacggcgccgatctaaagtcatttgacttaggcgacgagcttggcactgatccttatgaagattttcaagaaaactggaacactaaacatagcagtggtgttacccgtgaactcatgcgtgagcttaacggaggggcatacactcgctatgtcgataacaacttctgtggccctgatggctaccctcttgagtgcattaaagaccttctagcacgtgctggtaaagcttcatgcactttgtccgaacaactggactttattgacactaagaggggtgtatactgctgccgtgaacatgagcatgaaattgcttggtacacggaacgttctgaaaagagctatgaattgcagacaccttttgaaattaaattggcaaagaaatttgacaccttcaatggggaatgtccaaattttgtatttcccttaaattccataatcaagactattcaaccaagggttgaaaagaaaaagcttgatggctttatgggtagaattcgatctgtctatccagttgcgtcaccaaatgaatgcaaccaaatgtgcctttcaactctcatgaagtgtgatcattgtggtgaaacttcatggcagacgggcgattttgttaaagccacttgcgaattttgtggcactgagaatttgactaaagaaggtgccactacttgtggttacttaccccaaaatgctgttgttaaaatttattgtccagcatgtcacaattcagaagtaggacctgagcatagtcttgccgaataccataatgaatctggcttgaaaaccattcttcgtaagggtggtcgcactattgcctttggaggctgtgtgttctcttatgttggttgccataacaagtgtgcctattgggtcccgcgtgcgagtgcgaacataggttgtaatcatacgggtgtagtaggtgaaggttcggaaggtctaaatgataatctactagaaatactacaaaaagaaaaagtaaatataaatatagtaggtgattttaaactaaatgaagaaatagcgataatattagcgtcgttttcggcgtcgacgagtgcgtttgtagaaacggtaaaaggtttagattataaagcgtttaaacaaatagtagaatcgtgtggtaattttaaagtgacgaaaggtaaagcgaaaaaaggtgcgtggaatataggtgaacaaaaatcgatactaagtccgctatatgcgtttgcgtcggaagcggcgcgtgtagtacgttcgatattttcgcgtacgctagaaacggcgcaaaattcggtacgtgtattacaaaaagcggcgataacgatactagatggtatatcgcaatattcgctacgtctaatagatgcgatgatgtttacgtcggatttagcgacgaataatctagtagtaatggcgtatataacgggtggtgtagtacaattaacgtcgcaatggctaacgaatatatttggtacggtatatgaaaaactaaaaccggtactagattggctagaagaaaaatttaaagaaggtgtagaatttctacgtgatggttgggaaatagtaaaatttatatcgacgtgtgcgtgtgaaatagtaggtggtcaaatagtaacgtgtgcgaaagaaataaaagaatcggtacaaacgttttttaaactagtaaataaatttctagcgctatgtgcggattcgataataataggtggtgcgaaactaaaagcgctaaatctaggtgaaacgtttgtgacgcattcgaaaggtttatatcgtaaatgtgtaaaatcgcgtgaagaaacgggtctactaatgccgctaaaagcgccgaaagaaataatatttttagaaggtgaaacgctaccgacggaagtattaacggaagaagtagtattaaaaacgggtgatttacaaccgttagaacaaccgacgtcggaagcggtagaagcgccgttagtaggtacgccggtatgtataaatggtctaatgttactagaaataaaagatacggaaaaatattgtgcgctagcgccgaatatgatggtaacgaataatacgtttacgctaaaaggtggtgcgccgacgaaagtaacgtttggtgatgatacggtaatagaagtacaaggttataaatcggtaaatataacgtttgaactagatgaacgtatagataaagtactaaatgaaaaatgttcggcgtatacggtagaactaggtacggaagtaaatgaatttgcgtgtgtagtagcggatgcggtaataaaaacgttacaaccggtatcggaattactaacgccgctaggtatagatttagatgaatggtcgatggcgacgtattatttatttgatgaatcgggtgaatttaaattagcgtcgcatatgtattgttcgttttatccgccggatgaagatgaagaagaaggtgattgtgaagaagaagaatttgaaccgtcgacgcaatatgaatatggtacggaagatgattatcaaggtaaaccgttagaatttggtgcgacgtcggcggcgctacaaccggaagaagaacaagaagaagattggttggatgatgattcgcaacaaacggtaggtcaacaagatggttcggaagataatcaaacgacgacgatacaaacgatagtagaagtacaaccgcaattagaaatggaactaacgccggtagtacaaacgatagaagtaaattcgttttcgggttatttaaaactaacggataatgtatatataaaaaatgcggatatagtagaagaagcgaaaaaagtaaaaccgacggtagtagtaaatgcggcgaatgtatatctaaaacatggtggtggtgtagcgggtgcgttaaataaagcgacgaataatgcgatgcaagtagaatcggatgattatatagcgacgaatggtccgctaaaagtaggtggttcgtgtgtattatcgggtcataatctagcgaaacattgtctacatgtagtaggtccgaatgtaaataaaggtgaagatatacaactactaaaatcggcgtatgaaaattttaatcaacatgaagtactactagcgccgttattatcggcgggtatatttggtgcggacccgatacattcgttacgtgtgtgtgtagatacggtacgcacgaatgtatatttagcggtatttgataaaaatctatatgataaactagtatcgtcgtttttagaaatgaaatcggaaaaacaagtagaacaaaaaatagcggaaataccgaaagaagaagtaaaaccgtttataacggaatcgaaaccgtcggtagaacaacgtaaacaagatgataaaaaaataaaagcgtgtgtagaagaagtaacgacgacgctagaagaaacgaaatttctaacagaaaatttattactatatatagatataaatggtaatctacatccggattcggcgacgctagtatcggatatagatataacgtttttaaaaaaagatgcgccgtatatagtaggtgatgtagtacaagaaggtgtattaacggcggtagtaataccgacgaaaaaagcgggtggtacgacggaaatgctggcgaaagcgttacgtaaagtaccgacggataattatataacgacgtacccgggtcaaggtttaaatggttatacggtagaagaagcgaaaacggtactaaaaaaatgtaaatcggcgttttatatactaccgtcgataatatcgaatgaaaaacaagaaatactaggtacggtatcgtggaatttacgtgaaatgctagcgcatgcggaagaaacacgtaaattaatgccggtatgtgtagaaacgaaagcgatagtatcgacgatacaacgtaaatataaaggtataaaaatacaagaaggtgtagtagattatggtgcgcgtttttatttttatacgtcgaaaacgacggtagcgtcgctaataaatacgctaaatgatctaaatgaaacgctagtaacgatgccgctaggttatgtaacgcatggtttaaatttagaagaagcggcgcgttatatgcgttcgctaaaagtaccggcgacggtatcggtatcgtcgccggatgcggtaacggcgtataatggttatctaacgtcgtcgtcgaaaacgccggaagaacattttatagaaacgatatcgctagcgggttcgtataaagattggtcgtattcgggtcaatcgacgcaactaggtatagaatttctaaaacgtggtgataaatcggtatattatacgtcgaatccgacgacgtttcatctagatggtgaagtaataacgtttgataatctaaaaacgctactatcgttacgtgaagtacgtacgataaaagtatttacgacggtagataatataaatctacatacgcaagtagtagatatgtcgatgacatatggacaacaatttggtccgacgtatttagatggtgcggatgttacgaaaataaaaccgcataattcgcatgaaggtaaaacgttttatgtattaccgaatgatgatacgctacgtgtagaagcgtttgaatattatcatacgactgatccgtcgtttctaggtcgttatatgtcggcgttaaatcatacgaaaaaatggaaatatccgcaagtaaatggtttaacgtcgataaaatgggcggataataattgttatctagcgacggcgttattaacgctacaacaaatagaattaaaatttaatccgccggcgctacaagatgcgtattatcgtgcgcgtgcgggtgaagcggcgaatttttgtgcgctaatattagcgtattgtaataaaacggtaggtgaattaggtgatgtacgtgaaacgatgtcgtatttatttcaacatgcgaatttagattcgtgtaaacgtgtattaaatgtagtatgtaaaacgtgtggtcaacaacaaacgacgctaaaaggtgtagaagcggtaatgtatatgggtacgctatcgtatgaacaatttaaaaaaggtgtacaaataccgtgtacgtgtggtaaacaagcgacgaaatatctagtacaacaagaatcgccgtttgtaatgatgtcggcgccgccggcgcaatatgaactaaaacatggtacgtttacgtgtgcgtcggaatatacgggtaattatcaatgtggtcattataaacatataacgtcgaaagaaacgttatattgtatagatggtgcgttacttacgaaatcgtcggaatataaaggtccgataacggatgtattttataaagaaaattcgtatacgacgacgataaaaccggtaacgtataaattagatggtgtagtatgtacggaaatagatccgaaattagataattattataaaaaagataattcgtattttacggaacaaccgatagatctagtaccgaatcaaccatatccgaatgcgtcgtttgataattttaaatttgtatgtgataatataaaatttgcggatgatttaaatcaattaacgggttataaaaaaccggcgtcgcgtgaactaaaagtaacgttttttccggatttaaatggtgatgtagtagcgatagattataaacattatacgccgtcgtttaaaaaaggtgcgaaattattacataaaccgatagtatggcatgtaaataatgcgacgaataaagcgacgtataaaccgaatacgtggtgtatacggtgtctatggagcacgaaaccggtagaaacgtcgaattcgtttgatgtactaaaatcggaagatgcgcaaggtatggataatctagcgtgtgaagatctaaaaccggtatcggaagaagtagtagaaaatccgacgatacaaaaagatgtactggaatgtaatgtaaaaacgacggaagtagtaggtgatataatactaaaaccggctaataattcgttaaaaataacggaagaagtaggtcatacggatctaatggcggcgtatgtagataattcgtcgctaacgataaaaaaaccgaatgaattatcgcgtgtattaggtttaaaaacgctagcgacgcatggtttagctgctgtaaattcggtaccgtgggatacgatagcgaattatgcgaaaccgtttctaaataaagtagtatcgacgacgacgaatatagtaacgcgatgtttaaatcgtgtatgtacgaattatatgccgtatttttttacgttattactacaattatgtacgtttacgcgatcgacgaattcgcgtataaaagcgtcgatgccgacgacgatagcgaaaaatacggtaaaatcggtaggtaaattttgtctagaagcgtcgtttaattatttaaaatcgccgaatttttctaaactaataaatataataatatggtttttactattatcggtatgcctaggttcgttaatatattcgacggcggcgttaggtgtattaatgtcgaatttaggtatgccgtcgtattgtacgggttatcgtgaaggttatttaaattcgacgaatgtaacgatagcgacgtattgtacgggttcgataccgtgttcggtatgtctatcgggtttagattcgttagatacgtatccgtcgttagaaacgatacaaataacgatatcgtcgtttaaatgggatttaacggcgtttggtttagtagcggaatggtttttagcgtatatactatttacgcgatttttttatgtactaggtttagcggcgataatgcaattatttttttcgtattttgcggtacattttatttcgaattcgtggctaatgtggttaataataaatctagtacaaatggcgccgatatcggcgatggtacgtatgtatatattttttgcgtcgttttattatgtatggaaatcgtatgtacatgtagtagatggttgtaattcgtcgacgtgtatgatgtgttataaacgtaatcgtgcgacgcgagtagaatgtacgacgatagtaaatggtgtacgtcgttcgttttatgtatatgcgaatggtggtaaaggtttttgtaaactacataattggaattgtgtaaattgtgatacgttttgtgcgggttcgacgtttatatcggatgaagtagcgcgtgatttatcgctacaatttaaacgtccgataaatccgacggatcaatcgtcgtatatagtagattcggtaacggtaaaaaatggttcgatacatctatattttgataaagcgggtcaaaaaacgtatgaacgtcattcgctatcgcattttgtaaatttagataatctacgtgcgaataatacgaaaggttcgttaccgataaatgtaatagtatttgatggtaaatcgaaatgtgaagaatcgtcggcgaaatcggcgtcggtatattattcgcaactaatgtgtcaaccgatactattactagatcaagcgttagtatcggatgtaggtgattcggcggaagtagcggtaaaaatgtttgatgcgtatgtaaatacgttttcgtcgacgtttaatgtaccgatggaaaaactaaaaacgctagtagcgacggcggaagcggaactagcgaaaaatgtatctttagataatgtattatcgacgtttatatcggcggcgcgtcaaggttttgtagattcggatgtagaaacgaaagatgtagtagaatgtctaaaattatcgcatcaatcggatatagaagtaacgggtgattcgtgtaataattatatgctaacgtataataaagtagaaaatatgacgccgcgtgatctaggtgcgtgtatagattgttcggcgcgtcatataaatgcgcaagtagcgaaatcgcataatatagcgttaatatggaatgtaaaagattttatgtcgttatcggaacaactacgtaaacaaatacgttcggcggcgaaaaaaaataatttaccgtttaaattaacgtgtgcgacgacgcgacaagtagtaaatgtagtaacgacgaaaatagcgctaaaaggtggtaaaatagtaaataattggttaaaacaattaattaaagttacacttgtgttcctttttgttgctgctattttctatttaataacacctgttcatgtcatgtctaaacatactgacttttcaagtgaaatcataggatacaaggctattgatggtggtgtcactcgtgacatagcatctacagatacttgttttgctaacaaacatgctgattttgacacatggtttagccagcgtggtggtagttatactaatgacaaagcttgcccattgattgctgcagtcataacaagagaagtgggttttgtcgtgcctggtttgcctggcacgatattacgcacaactaatggtgactttttgcatttcttacctagagtttttagtgcagttggtaacatctgttacacaccatcaaaacttatagagtacactgactttgcaacatcagcttgtgttttggctgctgaatgtacaatttttaaagatgcttctggtaagccagtaccatattgttatgataccaatgtactagaaggttctgttgcttatgaaagtttacgccctgacacacgttatgtgctcatggatggctctattattcaatttcctaacacctaccttgaaggttctgttagagtggtaacaacttttgattctgagtactgtaggcacggcacttgtgaaagatcagaagctggtgtttgtgtatctactagtggtagatgggtacttaacaatgattattacagatctttaccaggagttttctgtggtgtagatgctgtaaatttacttactaatatgtttacaccactaattcaacctattggtgctttggacatatcagcatctatagtagctggtggtattgtagctatcgtagtaacatgccttgcctactattttatgaggtttagaagagcttttggtgaatacagtcatgtagttgcctttaatactttactattccttatgtcattcactgtactctgtttaacaccagtttactcattcttacctggtgtttattctgttatttacttgtacttgacattttatcttactaatgatgtttcttttttagcacatattcagtggatggttatgttcacacctttagtacctttctggataacaattgcttatatcatttgtatttccacaaagcatttctattggttctttagtaattacctaaagagacgtgtagtctttaatggtgtttcctttagtacttttgaagaagctgcgctgtgcacctttttgttaaataaagaaatgtatctaaagttgcgtagtgatgtgctattacctcttacgcaatataatagatacttagctctttataataagtacaagtattttagtggagcaatggatacaactagctacagagaagctgcttgttgtcatctcgcaaaggctctcaatgacttcagtaactcaggttctgatgttctttaccaaccaccacaaacctctatcacctcagctgttttgcagagtggttttagaaaaatggcattcccatctggtaaagttgagggttgtatggtacaagtaacttgtggtacaactacacttaacggtctttggcttgatgacgtagtttactgtccaagacatgtgatctgcacctctgaagacatgcttaaccctaattatgaagatttactcattcgtaagtctaatcataatttcttggtacaggctggtaatgttcaactcagggttattggacattctatgcaaaattgtgtacttaagcttaaggttgatacagccaatcctaagacacctaagtataagtttgttcgcattcaaccaggacagactttttcagtgttagcttgttacaatggttcaccatctggtgtttaccaatgtgctatgaggcccaatttcactattaagggttcattccttaatggttcatgtggtagtgttggttttaacatagattatgactgtgtctctttttgttacatgcaccatatggaattaccaactggagttcatgctggcacagacttagaaggtaacttttatggaccttttgttgacaggcaaacagcacaagcagctggtacggacacaactattacagttaatgttttagcttggttgtacgctgctgttataaatggagacaggtggtttctcaatcgatttaccacaactcttaatgactttaaccttgtggctatgaagtacaattatgaacctctaacacaagaccatgttgacatactaggacctctttctgctcaaactggaattgccgttttagatatgtgtgcttcattaaaagaattactgcaaaatggtatgaatggacgtaccatattgggtagtgctttattagaagatgaatttacaccttttgatgttgttagacaatgctcaggtgttactttccaaagtgcagtgaaaagaacaatcaagggtacacaccactggttgttactcacaattttgacttcacttttagttttagtccagagtactcaatggtctttgttcttttttttgtatgaaaatgcctttttaccttttgctatgggtattattgctatgtctgcttttgcaatgatgtttgtcaaacataagcatgcgtttctatgtttatttttattaccgtcgctagcgacggtagcgtattttaatatggtatatatgccggcgtcgtgggtaatgcgtataatgacgtggttagatatggtagatacgtcgttatcgggttttaaactaaaagattgtgtaatgtatgcgtcggcggtagtattactaatactaatgacggcgcgtacggtatatgatgatggtgcgcgtcgtgtatggacgctaatgaatgtattaacgctagtatataaagtatattatgggaatgcgttagatcaagcgatatcgatgtgggcgctaataatatcggtaacgtcgaattattcgggtgtagtaacgacggtaatgtttttagcgcgtggtatagtatttatgtgtgtagaatattgtccgatattttttataacgggtaatacactacaatgtataatgctagtatattgttttttaggttatttttgtacgtgttattttggtctattttgtttactaaatcgttattttcgtctaacactaggtgtatatgattatttagtatcgacgcaagaatttcgttatatgaattcgcaaggtctactaccgccgaaaaattcgatagatgcgtttaaactaaatataaaattattaggtgtaggtggtaaaccgtgtataaaagtagcgacggtacaatcgaaaatgtcggatgtaaaatgtacatcggtagtattactatcggtattacaacaactacgtgtagaatcgtcgtcgaaattatgggcgcaatgtgtacaattacataatgatatactattagcgaaagatacgacggaagcgtttgaaaaaatggtatcgctactatcggtattactatcgatgcaaggtgcggtagatataaataaactatgtgaagaaatgctagataatcgtgcgacgttacaagcgatagcgtcggaattttcgtcgctaccgtcgtatgcggcgtttgcgacggcgcaagaagcgtatgaacaagcggtagcgaatggtgattcggaagtagtactaaaaaaattaaaaaaatcgttaaatgtagcgaaatcggaatttgatcgtgatgcggcgatgcaacgtaaattagaaaaaatggcggatcaagcgatgacgcaaatgtataaacaagcgcgttcggaagataaacgtgcgaaagtaacgtcggcgatgcaaacgatgctatttacgatgctacgtaaattagataatgatgcgctaaataatataataaataatgcgcgtgatggttgtgtaccgttaaatataataccgctaacgacggcggcgaaactaatggtagtaataccggattataatacatataaaaatacgtgtgatggtacgacgtttacgtatgcgtcggcgttatgggaaatacaacaagtagtagatgcggattcgaaaatagtacaactatcggaaatatcgatggataattcgccgaatttagcgtggccgctaatagtaacggcgttacgtgcgaattcggcggtaaaattacaaaataatgaactatcgccggtagcgctacgacagatgtcttgtgctgccggtactacacaaactgcttgcactgatgacaatgcgttagcttactacaacacaacaaagggaggtaggtttgtacttgcactgttatccgatttacaggatttgaaatgggctagattccctaagagtgatggaactggtactatctatacagaactggaaccaccttgtaggtttgttacagacacacctaaaggtcctaaagtgaagtatttatactttattaaaggattaaacaacctaaatagaggtatggtacttggtagtttagctgccacagtacgtctacaagctggtaatgcaacagaagtgcctgccaattcaactgtattatctttctgtgcttttgctgtagatgctgctaaagcttacaaagattatctagctagtgggggacaaccaatcactaattgtgttaagatgttgtgtacacacactggtactggtcaggcaataacagttacaccggaagccaatatggatcaagaatcctttggtggtgcatcgtgttgtctgtactgccgttgccacatagatcatccaaatcctaaaggattttgtgacttaaaaggtaagtatgtacaaatacctacaacttgtgctaatgaccctgtgggttttacacttaaaaacacagtctgtaccgtctgcggtatgtggaaaggttatggctgtagttgtgatcaactccgcgaacccatgcttcagtcagctgatgcacaatcgtttttaaacgggtttgcggtgtaagtgcagcccgtcttacaccgtgcggcacaggcactagtactgatgtcgtatacagggcttttgacatctacaatgataaagtagctggttttgctaaattcctaaaaactaattgttgtcgcttccaagaaaaggacgaagatgacaatttaattgattcttactttgtagttaagagacacactttctctaactaccaacatgaagaaacaatttataatttacttaaggattgtccagctgttgctaaacatgacttctttaagtttagaatagacggtgacatggtaccacatatatcacgtcaacgtcttactaaatacacaatggcagacctcgtctatgctttaaggcattttgatgaaggtaattgtgacacattaaaagaaatacttgtcacatacaattgttgtgatgatgattatttcaataaaaaggactggtatgattttgtagaaaacccagatatattacgcgtatacgccaacttaggtgaacgtgtacgccaagctttgttaaaaacagtacaattctgtgatgccatgcgaaatgctggtattgttggtgtactgacattagataatcaagatctcaatggtaactggtatgatttcggtgatttcatacaaaccacgccaggtagtggagttcctgttgtagattcttattattcattgttaatgcctatattaaccttgaccagggctttaactgcagagtcacatgttgacactgacttaacaaagccttacattaagtgggatttgttaaaatatgacttcacggaagagaggttaaaactctttgaccgttattttaaatattgggatcagacataccacccaaattgtgttaactgtttggatgacagatgcattctgcattgtgcaaactttaatgttttattctctacagtgttcccacctacaagttttggaccactagtgagaaaaatatttgttgatggtgttccatttgtagtttcaactggataccacttcagagagctaggtgttgtacataatcaggatgtaaacttacatagctctagacttagttttaaggaattacttgtgtatgctgctgaccctgctatgcacgctgcttctggtaatctattactagataaacgcactacgtgcttttcagtagctgcacttactaacaatgttgcttttcaaactgtcaaacccggtaattttaacaaagacttctatgactttgctgtgtctaagggtttctttaaggaaggaagttctgttgaattaaaacacttcttctttgctcaggatggtaatgctgctatcagcgattatgactactatcgttataatctaccaacaatgtgtgatatcagacaactactatttgtagttgaagttgttgataagtactttgattgttacgatggtggctgtattaatgctaaccaagtcatcgtcaacaacctagacaaatcagctggttttccatttaataaatggggtaaggctagactttattatgattcaatgagttatgaggatcaagatgcacttttcgcatatacaaaacgtaatgtcatccctactataactcaaatgaatcttaagtatgccattagtgcaaagaatagagctcgcaccgtagctggtgtctctatctgtagtactatgaccaatagacagtttcatcaaaaattattgaaatcaatagccgccactagaggagctactgtagtaattggaacaagcaaattctatggtggttggcacaacatgttaaaaactgtttatagtgatgtagaaaaccctcaccttatgggttgggattatcctaaatgtgatagagccatgcctaacatgcttagaattatggcctcacttgttcttgctcgcaaacatacaacgtgttgtagcttgtcacaccgtttctatagattagctaatgagtgtgctcaagtattgagtgaaatggtcatgtgtggcggttcactatatgttaaaccaggtggaacctcatcaggagatgccacaactgcttatgctaatagtgtttttaacatttgtcaagctgtcacggccaatgttaatgcacttttatctactgatggtaacaaaattgccgataagtatgtccgcaatttacaacacagactttatgagtgtctctatagaaatagagatgttgacacagactttgtgaatgagttttacgcatatttgcgtaaacatttctcaatgatgatactctctgacgatgctgttgtgtgtttcaatagcacttatgcatctcaaggtctagtggctagcataaagaactttaagtcagttctttattatcaaaacaatgtttttatgtctgaagcaaaatgttggactgagactgaccttactaaaggacctcatgaattttgctctcaacatacaatgctagttaaacagggtgatgattatgtgtaccttccttacccagatccatcaagaatcctaggggccggctgttttgtagatgatatcgtaaaaacagatggtacacttatgattgaacggttcgtgtctttagctatagatgcttacccacttactaaacatcctaatcaggagtatgctgatgtctttcatttgtacttacaatacataagaaagctacatgatgagttaacaggacacatgttagacatgtattctgttatgcttactaatgataacacttcaaggtattgggaacctgagttttatgaggctatgtacacaccgcatacagtcttacaggctgttggggcttgtgttctttgcaattcacagacttcattaagatgtggtgcttgcatacgtagaccattcttatgttgtaaatgctgttacgaccatgtcatatcaacatcacataaattagtcttgtctgttaatccgtatgtttgcaatgctccaggttgtgatgtcacagatgtgactcaactttacttaggaggtatgagctattattgtaaatcacataaaccacccattagttttccattgtgtgctaatggacaagtttttggtttatataaaaatacatgtgttggtagcgataatgttactgactttaatgcaattgcaacatgtgactggacaaatgctggtgattacattttagctaacacctgtactgaaagactcaagctttttgcagcagaaacgctcaaagctactgaggagacatttaaactgtcttatggtattgctactgtacgtgaagtgctgtctgacagagaattacatctttcatgggaagttggtaaacctagaccaccacttaaccgaaattatgtctttactggttatcgtgtaactaaaaacagtaaagtacaaataggagagtacacctttgaaaaaggtgactatggtgatgctgttgtttaccgaggtacaacaacttacaaattaaatgttggtgattattttgtgctgacatcacatacagtaatgccattaagtgcacctacactagtgccacaagagcactatgttagaattactggcttatacccaacactcaatatctcagatgagttttctagcaatgttgcaaattatcaaaaggttggtatgcaaaagtattctacactccagggaccacctggtactggtaagagtcattttgctattggcctagctctctactacccttctgctcgcatagtgtatacagcttgctctcatgccgctgttgatgcactatgtgagaaggcattaaaatatttgcctatagataaatgtagtagaattatacctgcacgtgctcgtgtagagtgttttgataaattcaaagtgaattcaacattagaacagtatgtcttttgtactgtaaatgcattgcctgagacgacagcagatatagttgtctttgatgaaatttcaatggccacaaattatgatttgagtgttgtcaatgccagattacgtgctaagcactatgtgtacattggcgaccctgctcaattacctgcaccacgcacattgctaactaagggcacactagaaccagaatatttcaattcagtgtgtagacttatgaaaactataggtccagacatgttcctcggaacttgtcggcgttgtcctgctgaaattgttgacactgtgagtgctttggtttatgataataagcttaaagcacataaagacaaatcagctcaatgctttaaaatgttttataagggtgttatcacgcatgatgtttcatctgcaattaacaggccacaaataggcgtggtaagagaattccttacacgtaaccctgcttggagaaaagctgtctttatttcaccttataattcacagaatgctgtagcctcaaagattttgggactaccaactcaaactgttgattcatcacagggctcagaatatgactatgtcatattcactcaaaccactgaaacagctcactcttgtaatgtaaacagatttaatgttgctattaccagagcaaaagtaggcatactttgcataatgtctgatagagacctttatgacaagttgcaatttacaagtcttgaaattccacgtaggaatgtggcaactttacaagctgaaaatgtaacaggactctttaaagattgtagtaaggtaatcactgggttacatcctacacaggcacctacacacctcagtgttgacactaaattcaaaactgaaggtttatgtgttgacatacctggcatacctaaggacatgacctatagaagactcatctctatgatgggttttaaaatgaattatcaagttaatggttaccctaacatgtttatcacccgcgaagaagctataagacatgtacgtgcatggattggcttcgatgtcgaggggtgtcatgctactagagaagctgttggtaccaatttacctttacagctaggtttttctacaggtgttaacctagttgctgtacctacaggttatgttgatacacctaataatacagatttttccagagttagtgctaaaccaccgcctggagatcaatttaaacacctcataccacttatgtacaaaggacttccttggaatgtagtgcgtataaagattgtacaaatgttaagtgacacacttaaaaatctctctgacagagtcgtatttgtcttatgggcacatggctttgagttgacatctatgaagtattttgtgaaaataggacctgagcgcacctgttgtctatgtgatagacgtgccacatgcttttccactgcttcagacacttatgcctgttggcatcattctattggatttgattacgtctataatccgtttatgattgatgttcaacaatggggttttacaggtaacctacaaagcaaccatgatctgtattgtcaagtccatggtaatgcacatgtagctagttgtgatgcaatcatgactaggtgtctagctgtccacgagtgctttgttaagcgtgttgactggactattgaatatcctataattggtgatgaactgaagattaatgcggcttgtagaaaggttcaacacatggttgttaaagctgcattattagcagacaaattcccagttcttcacgacattggtaaccctaaagctattaagtgtgtacctcaagctgatgtagaatggaagttctatgatgcacagccttgtagtgacaaagcttataaaatagaagaattattctattcttatgccacacattctgacaaattcacagatggtgtatgcctattttggaattgcaatgtcgatagatatcctgctaattccattgtttgtagatttgacactagagtgctatctaaccttaacttgcctggttgtgatggtggcagtttgtatgtaaataaacatgcattccacacaccagcttttgataaaagtgcttttgttaatttaaaacaattaccatttttctattactctgacagtccatgtgagtctcatggaaaacaagtagtgtcagatatagattatgtaccactaaagtctgctacgtgtataacacgttgcaatttaggtggtgctgtctgtagacatcatgctaatgagtacagattgtatctcgatgcttataacatgatgatctcagctggctttagcttgtgggtttacaaacaatttgatacttataacctctggaacacttttacaagacttcagagtttagaaaatgtggcttttaatgttgtaaataagggacactttgatggacaacagggtgaagtaccagtttctatcattaataacactgtttacacaaaagttgatggtgttgatgtagaattgtttgaaaataaaacaacattacctgttaatgtagcatttgagctttgggctaagcgcaacattaaaccagtaccagaggtgaaaatactcaataatttgggtgtggacattgctgctaatactgtgatctgggactacaaaagagatgctccagcacatatatctactattggtgtttgttctatgactgacatagccaagaaaccaactgaaacgatttgtgcaccactcactgtcttttttgatggtagagttgatggtcaagtagacttatttagaaatgcccgtaatggtgttcttattacagaaggtagtgttaaaggtttacaaccatctgtaggtcccaaacaagctagtcttaatggagtcacattaattggagaagccgtaaaaacacagttcaattattataagaaagttgatggtgttgtccaacaattacctgaaacttactttactcagagtagaaatttacaagaatttaaacccaggagtcaaatggaaattgatttcttagaattagctatggatgaattcattgaacggtataaattagaaggctatgccttcgaacatatcgtttatggagattttagtcatagtcagttaggtggtttacatctactgattggactagctaaacgttttaaggaatcaccttttgaattagaagattttattcctatggacagtacagttaaaaactatttcataacagatgcgcaaacaggttcatctaagtgtgtgtgttctgttattgatttattacttgatgattttgttgaaataataaaatcccaagatttatctgtagtttctaaggttgtcaaagtgactattgactatacagaaatttcatttatgctttggtgtaaagatggccatgtagaaacattttacccaaaattacaatctagtcaagcgtggcaaccgggtgttgctatgcctaatctttacaaaatgcaaagaatgctattagaaaagtgtgaccttcaaaattatggtgatagtgcaacattacctaaaggcataatgatgaatgtcgcaaaatatactcaactgtgtcaatatttaaacacattaacattagctgtaccctataatatgagagttatacattttggtgctggttctgataaaggagttgcaccaggtacagctgttttaagacagtggttgcctacgggtacgctgcttgtcgattcagatcttaatgactttgtctctgatgcagattcaactttgattggtgattgtgcaactgtacatacagctaataaatgggatctcattattagtgatatgtacgaccctaagactaaaaatgttacaaaagaaaatgactctaaagagggttttttcacttacatttgtgggtttatacaacaaaagctagctcttggaggttccgtggctataaagataacagaacattcttggaatgctgatctttataagctcatgggacacttcgcatggtggacagcctttgttactaatgtgaatgcgtcatcatctgaagcatttttaattggatgtaattatcttggcaaaccacgcgaacaaatagatggttatgtcatgcatgcaaattacatattttggaggaatacaaatccaattcagttgtcttcctattctttatttgacatgagtaaatttccccttaaattaaggggtactgctgttatgtctttaaaagaaggtcaaatcaatgatatgattttatctcttcttagtaaaggtagacttataattagagaaaacaacagagttgttatttctagtgatgttcttgttaacaactaaacgaacaatgtttgtttttcttgttttattgccactagtctctagtcagtgtgttaatcttacaaccagaactcaattaccccctgcatacactaattctttcacacgtggtgtttattaccctgacaaagttttcagatcctcagttttacattcaactcaggacttgttcttacctttcttttccaatgttacttggttccatgctatacatgtctctgggaccaatggtactaagaggtttgataaccctgtcctaccatttaatgatggtgtttattttgcttccactgagaagtctaacataataagaggctggatttttggtactactttagattcgaagacccagtccctacttattgttaataacgctactaatgttgttattaaagtctgtgaatttcaattttgtaatgatccatttttgggtgtttattaccacaaaaacaacaaaagttggatggaaagtgagttcagagtttattctagtgcgaataattgcacttttgaatatgtctctcagccttttcttatggaccttgaaggaaaacagggtaatttcaaaaatcttagggaatttgtgtttaagaatattgatggttattttaaaatatattctaagcacacgcctattaatttagtgcgtgatctcccccagggtttttcggctttagaaccattggtagatttgccaataggtattaacatcactaggtttcaaactttacttgctttacatagaagttatttgactcctggtgattcttcttcaggttggacagctggtgctgcagcttattatgtgggttatcttcaacctaggacttttctattaaaatataatgaaaatggaaccattacagatgctgtagactgtgcacttgaccctctctcagaaacaaagtgtacgttgaaatccttcactgtagaaaaaggaatctatcaaacttctaactttagagtccaaccaacagaatctattgttagatttcctaatattacaaacttgtgcccttttggtgaagtttttaacgccaccagatttgcatctgtttatgcttggaacaggaagagaatcagcaactgtgttgctgattattctgtcctatataattccgcatcattttccacttttaagtgttatggagtgtctcctactaaattaaatgatctctgctttactaatgtctatgcagattcatttgtaattagaggtgatgaagtcagacaaatcgctccagggcaaactggaaagattgctgattataattataaattaccagatgattttacaggctgcgttatagcttggaattctaacaatcttgattctaaggttggtggtaattataattacctgtatagattgtttaggaagtctaatctcaaaccttttgagagagatatttcaactgaaatctatcaggccggtagcacaccttgtaatggtgttgaaggttttaattgttactttcctttacaatcatatggtttccaacccactaatggtgttggttaccaaccatacagagtagtagtactttcttttgaacttctacatgcaccagcaactgtttgtggacctaaaaagtctactaatttggttaaaaacaaatgtgtcaatttcaacttcaatggtttaacaggcacaggtgttcttactgagtctaacaaaaagtttctgcctttccaacaatttggcagagacattgctgacactactgatgctgtccgtgatccacagacacttgagattcttgacattacaccatgttcttttggtggtgtcagtgttataacaccaggaacaaatacttctaaccaggttgctgttctttatcaggatgttaactgcacagaagtccctgttgctattcatgcagatcaacttactcctacttggcgtgtttattctacaggttctaatgtttttcaaacacgtgcaggctgtttaataggggctgaacatgtcaacaactcatatgagtgtgacatacccattggtgcaggtatatgcgctagttatcagactcagactaattctcctcggcgggcacgtagtgtagctagtcaatccatcattgcctacactatgtcacttggtgcagaaaattcagttgcttactctaataactctattgccatacccacaaattttactattagtgttaccacagaaattctaccagtgtctatgaccaagacatcagtagattgtacaatgtacatttgtggtgattcaactgaatgcagcaatcttttgttgcaatatggcagtttttgtacacaattaaaccgtgctttaactggaatagctgttgaacaagacaaaaacacccaagaagtttttgcacaagtcaaacaaatttacaaaacaccaccaattaaagattttggtggttttaatttttcacaaatattaccagatccatcaaaaccaagcaagaggtcatttattgaagatctacttttcaacaaagtgacacttgcagatgctggcttcatcaaacaatatggtgattgccttggtgatattgctgctagagacctcatttgtgcacaaaagtttaacggccttactgttttgccacctttgctcacagatgaaatgattgctcaatacacttctgcactgttagcgggtacaatcacttctggttggacctttggtgcaggtgctgcattacaaataccatttgctatgcaaatggcttataggtttaatggtattggagttacacagaatgttctctatgagaaccaaaaattgattgccaaccaatttaatagtgctattggcaaaattcaagactcactttcttccacagcaagtgcacttggaaaacttcaagatgtggtcaaccaaaatgcacaagctttaaacacgcttgttaaacaacttagctccaattttggtgcaatttcaagtgttttaaatgatatcctttcacgtcttgacaaagttgaggctgaagtgcaaattgataggttgatcacaggcagacttcaaagtttgcagacatatgtgactcaacaattaattagagctgcagaaatcagagcttctgctaatcttgctgctactaaaatgtcagagtgtgtacttggacaatcaaaaagagttgatttttgtggaaagggctatcatcttatgtccttccctcagtcagcacctcatggtgtagtcttcttgcatgtgacttatgtccctgcacaagaaaagaacttcacaactgctcctgccatttgtcatgatggaaaagcacactttcctcgtgaaggtgtctttgtttcaaatggcacacactggtttgtaacacaaaggaatttttatgaaccacaaatcattactacagacaacacatttgtgtctggtaactgtgatgttgtaataggaattgtcaacaacacagtttatgatcctttgcaacctgaattagactcattcaaggaggagttagataaatattttaagaatcatacatcaccagatgttgatttaggtgacatctctggcattaatgcttcagttgtaaacattcaaaaagaaattgaccgcctcaatgaggttgccaagaatttaaatgaatctctcatcgatctccaagaacttggaaagtatgagcagtatataaaatggccatggtacatttggctaggttttatagctggcttgattgccatagtaatggtgacaattatgctttgctgtatgaccagttgctgtagttgtctcaagggctgttgttcttgtggatcctgctgcaaatttgatgaagacgactctgagccagtgctcaaaggagtcaaattacattacacataaacgaacttatggatttgtttatgagaatcttcacaattggaactgtaactttgaagcaaggtgaaatcaaggatgctactccttcagattttgttcgcgctactgcaacgataccgatacaagcctcactccctttcggatggcttattgttggcgttgcacttcttgctgtttttcagagcgcttccaaaatcataaccctcaaaaagagatggcaactagcactctccaagggtgttcactttgtttgcaacttgctgttgttgtttgtaacagtttactcacaccttttgctcgttgctgctggccttgaagccccttttctctatctttatgctttagtctacttcttgcagagtataaactttgtaagaataataatgaggctttggctttgctggaaatgccgttccaaaaacccattactttatgatgccaactattttctttgctggcatactaattgttacgactattgtataccttacaatagtgtaacttcttcaattgtcattacttcaggtgatggcacaacaagtcctatttctgaacatgactaccagattggtggttatactgaaaaatgggaatctggagtaaaagactgtgttgtattacacagttacttcacttcagactattaccagctgtactcaactcaattgagtacagacactggtgttgaacatgttaccttcttcatctacaataaaattgttgatgagcctgaagaacatgtccaaattcacacaatcgacggttcatccggagttgttaatccagtaatggaaccaatttatgatgaaccgacgacgactactagcgtgcctttgtaagcacaagctgatgagtacgaacttatgtactcattcgtttcggaagagacaggtacgttaatagttaatagcgtacttctttttcttgctttcgtggtattcttgctagttacactagccatccttactgcgcttcgattgtgtgcgtactgctgcaatattgttaacgtgagtcttgtaaaaccttctttttacgtttactctcgtgttaaaaatctgaattcttctagagttcctgatcttctggtctaaacgaactaaatattatattagtttttctgtttggaactttaattttagccatggcagattccaacggtactattaccgttgaagagcttaaaaagctccttgaacaatggaacctagtaataggtttcctattccttacatggatttgtcttctacaatttgcctatgccaacaggaataggtttttgtatataattaagttaattttcctctggctgttatggccagtaactttagcttgttttgtgcttgctgctgtttacagaataaattggatcaccggtggaattgctatcgcaatggcttgtcttgtaggcttgatgtggctcagctacttcattgcttctttcagactgtttgcgcgtacgcgatccatgtggtcattcaatccagaaactaacattcttctcaacgtgccactccatggcactattctgaccagaccgcttctagaaagtgaactcgtaatcggagctgtgatccttcgtggacatcttcgtattgctggacaccatctaggacgctgtgacatcaaggacctgcctaaagaaatcactgttgctacatcacgaacgctttcttattacaaattgggagcttcgcagcgtgtagcaggtgactcaggttttgctgcatacagtcgctacaggattggcaactataaattaaacacagaccattccagtagcagtgacaatattgctttgcttgtacagtaagtgacaacagatgtttcatctcgttgactttcaggttactatagcagagatattactaattattatgaggacttttaaagtttccatttggaatcttgattacatcataaacctcataattaaaaatttatctaagtcactaactgagaataaatattctcaattagatgaagagcaaccaatggagattgattaaacgaacatgaaaattattcttttcttggcactgataacactcgctacttgtgagctttatcactaccaagagtgtgttagaggtacaacagtacttttaaaagaaccttgctcttctggaacatacgagggcaattcaccatttcatcctctagctgataacaaatttgcactgacttgctttagcactcaatttgcttttgcttgtcctgacggcgtaaaacacgtctatcagttacgtgccagatcagtttcacctaaactgttcatcagacaagaggaagttcaagaactttactctccaatttttcttattgttgcggcaatagtgtttataacactttgcttcacactcaaaagaaagacagaatgattgaactttcattaattgacttctatttgtgctttttagcctttctgctattccttgttttaattatgcttattatcttttggttctcacttgaactgcaagatcataatgaaacttgtcacgcctaaacgaacatgaaatttcttgttttcttaggaatcatcacaactgtagctgcatttcaccaagaatgtagtttacagtcatgtactcaacatcaaccatatgtagttgatgacccgtgtcctattcacttctattctaaatggtatattagagtaggagctagaaaatcagcacctttaattgaattgtgcgtggatgaggctggttctaaatcacccattcagtacatcgatatcggtaattatacagtttcctgtttaccttttacaattaattgccaggaacctaaattgggtagtcttgtagtgcgttgttcgttctatgaagactttttagagtatcatgacgttcgtgttgttttagatttcatctaaacgaacaaactaaaatgtctgataatggaccccaaaatcagcgaaatgcaccccgcattacgtttggtggaccctcagattcaactggcagtaaccagaatggagaacgcagtggggcgcgatcaaaacaacgtcggccccaaggtttacccaataatactgcgtcttggttcaccgctctcactcaacatggcaaggaagaccttaaattccctcgaggacaaggcgttccaattaacaccaatagcagtccagatgaccaaattggctactaccgaagagctaccagacgaattcgtggtggtgacggtaaaatgaaagatctcagtccaagatggtatttctactacctaggaactgggccagaagctggacttccctatggtgctaacaaagacggcatcatatgggttgcaactgagggagccttgaatacaccaaaagatcacattggcacccgcaatcctgctaacaatgctgcaatcgtgctacaacttcctcaaggaacaacattgccaaaaggcttctacgcagaagggagcagaggcggcagtcaagcctcttctcgttcctcatcacgtagtcgcaacagttcaagaaattcaactccaggcagcagtaggggaacttctcctgctagaatggctggcaatggcggtgatgctgctcttgctttgctgctgcttgacagattgaaccagcttgagagcaaaatgtctggtaaaggccaacaacaacaaggccaaactgtcactaagaaatctgctgctgaggcttctaagaagcctcggcaaaaacgtactgccactaaagcatacaatgtaacacaagctttcggcagacgtggtccagaacaaacccaaggaaattttggggaccaggaactaatcagacaaggaactgattacaaacattggccgcaaattgcacaatttgcccccagcgcttcagcgttcttcggaatgtcgcgcattggcatggaagtcacaccttcgggaacgtggttgacctacacaggtgccatcaaattggatgacaaagatccaaatttcaaagatcaagtcattttgctgaataagcatattgacgcatacaaaacattcccaccaacagagcctaaaaaggacaaaaagaagaaggctgatgaaactcaagccttaccgcagagacagaagaaacagcaaactgtgactcttcttcctgctgcagatttggatgatttctccaaacaattgcaacaatccatgagcagtgctgactcaactcaggcctaaactcatgcagaccacacaaggcagatgggctatataaacgttttcgcttttccgtttacgatatatagtctactcttgtgcagaatgaattctcgtaactacatagcacaagtagatgtagttaactttaatctcacatagcaatctttaatcagtgtgtaacattagggaggacttgaaagagccaccacattttcaccgaggccacgcggagtacgatcgagtgtacagtgaacaatgctagggagagctgcctatatggaagagccctaatgtgtaaaattaattttagtagtgctatccccatgtgattttaatagcttcttaggagaatgacaaaaaaaaaaaaaaaaaaaaaaaaaaaaaaaaaaaaaaaaaaaaaaaaaaaaaaaaaaagggtcggcatggcatctccacctcctcgcggtccgacctgggcatccgaaggaggacgcacgtccactcggatggctaagggagcagcacactggcggccgttactagggccgcgcccttcccaacagttgcgcagcctgaatggcgaatggagatccaatttttaagtgtataatgtgttaaactactgattctaattgtttgtgtattttagattcacagtcccaaggctcatttcaggcccctcagtcctcacagtctgttcatgatcataatcagccataccacatttgtagaggttttacttgctttaaaaaacctcccacacctccccctgaacctgaaacataaaatgaatgcaattgttgttgttaacttgtttattgcagcttataatggttacaaataaagcaatagcatcacaaatttcacaaataaagcatttttttcactgcattctagttgtggtttgtccaaactcatcaatgtatcttaaagcttgagtattctatagtctcacctaaatagcttggcgtaatcatggtcatagctgtttcctgtgtgaaattgttatccgctcacaattccacacaacatacgagccggaagcataaagtgtaaagcctggggtgcctaatgagtgagctaactcacattaattgcgttgcgctcactgcccgctttccagtcgggaaacctgtcgtgccagctgcattaatgaatcggccaacgcgaaccccttgcggccgcccgggccgtcgaccaattctcatgtttgacagcttatcatcgaatttctgccattcatccgcttattatcacttattcaggcgtagcaaccaggcgtttaagggcaccaataactgccttaaaaaaattacgccccgccctgccactcatcgcagtactgttgtaattcattaagcattctgccgacatggaagccatcacaaacggcatgatgaacctgaatcgccagcggcatcagcaccttgtcgccttgcgtataatatttgcccatggtgaaaacgggggcgaagaagttgtccatattggccacgtttaaatcaaaactggtgaaactcacccagggattggctgagacgaaaaacatattctcaataaaccctttagggaaataggccaggttttcaccgtaacacgccacatcttgcgaatatatgtgtagaaactgccggaaatcgtcgtggtattcactccagagcgatgaaaacgtttcagtttgctcatggaaaacggtgtaacaagggtgaacactatcccatatcaccagctcaccgtctttcattgccatacgaaattccggatgagcattcatcaggcgggcaagaatgtgaataaaggccggataaaacttgtgcttatttttctttacggtctttaaaaaggccgtaatatccagctgaacggtctggttataggtacattgagcaactgactgaaatgcctcaaaatgttctttacgatgccattgggatatatcaacggtggtatatccagtgatttttttctccattttagcttccttagctcctgaaaatctcgataactcaaaaaatacgcccggtagtgatcttatttcattatggtgaaagttggaacctcttacgtgccgatcaacgtctcattttcgccaaaagttggcccagggcttcccggtatcaacagggacaccaggatttatttattctgcgaagtgatcttccgtcacaggtatttattcgcgataagctcatggagcggcgtaaccgtcgcacaggaaggacagagaaagcgcggatctgggaagtgacggacagaacggtcaggacctggattggggaggcggttgccgccgctgctgctgacggtgtgacgttctctgttccggtcacaccacatacgttccgccattcctatgcgatgcacatgctgtatgccggtataccgctgaaagttctgcaaagcctgatgggacataagtccatcagttcaacggaagtctacacgaaggtttttgcgctggatgtggctgcccggcaccgggtgcagtttgcgatgccggagtctgatgcggttgcgatgctgaaacaattatcctgagaataaatgccttggcctttatatggaaatgtggaactgagtggatatgctgtttttgtctgttaaacagagaagctggctgttatccactgagaagcgaacgaaacagtcgggaaaatctcccattatcgtagagatccgcattattaatctcaggagcctgtgtagcgtttataggaagtagtgttctgtcatgatgcctgcaagcggtaacgaaaacgatttgaatatgccttcaggaacaatagaaatcttcgtgcggtgttacgttgaagtggagcggattatgtcagcaatggacagaacaacctaatgaacacagaaccatgatgtggtctgtccttttacagccagtagtgctcgccgcagtcgagcgacagggcgaagccctcggctggttgccctcgccgctgggctggcggccgtctatggccctgcaaacgcgccagaaacgccgtcgaagccgtgtgcgagacaccgcggccggccgccggcgttgtggatacctcgcggaaaacttggccctcactgacagatgaggggcggacgttgacacttgaggggccgactcacccggcgcggcgttgacagatgaggggcaggctcgatttcggccggcgacgtggagctggccagcctcgcaaatcggcgaaaacgcctgattttacgcgagtttcccacagatgatgtggacaagcctggggataagtgccctgcggtattgacacttgaggggcgcgactactgacagatgaggggcgcgatccttgacacttgaggggcagagtgctgacagatgaggggcgcacctattgacatttgaggggctgtccacaggcagaaaatccagcatttgcaagggtttccgcccgtttttcggccaccgctaacctgtcttttaacctgcttttaaaccaatatttataaaccttgtttttaaccagggctgcgccctgtgcgcgtgaccgcgcacgccgaaggggggtgcccccccttctcgaaccctcccggtcgagtgagcgaggaagcaccagggaacagcacttatatattctgcttacacacgatgcctgaaaaaacttcccttggggttatccacttatccacggggatatttttataattattttttttatagtttttagatcttcttttttagagcgccttgtaggcctttatccatgctggttctagagaaggtgttgtgacaaattgccctttcagtgtgacaaatcaccctcaaatgacagtcctgtctgtgacaaattgcccttaaccctgtgacaaattgccctcagaagaagctgttttttcacaaagttatccctgcttattgactcttttttatttagtgtgacaatctaaaaacttgtcacacttcacatggatctgtcatggcggaaacagcggttatcaatcacaagaaacgtaaaaatagcccgcgaatcgtccagtcaaacgacctcactgaggcggcatatagtctctcccgggatcaaaaacgtatgctgtatctgttcgttgaccagatcagaaaatctgatggcaccctacaggaacatgacggtatctgcgagatccatgttgctaaatatgctgaaatattcggattgacctctgcggaagccagtaaggatatacggcaggcattgaagagtttcgcggggaaggaagtggttttttatcgccctgaagaggatgccggcgatgaaaaaggctatgaatcttttccttggtttatcaaacgtgcgcacagtccatccagagggctttacagtgtacatatcaacccatatctcattcccttctttatcgggttacagaaccggtttacgcagtttcggcttagtgaaacaaaagaaatcaccaatccgtatgccatgcgtttatacgaatccctgtgtcagtatcgtaagccggatggctcaggcatcgtctctctgaaaatcgactggatcatagagcgttaccagctgcctcaaagttaccagcgtatgcctgacttccgccgccgcttcctgcaggtctgtgttaatgagatcaacagcagaactccaatgcgcctctcatacattgagaaaaagaaaggccgccagacgactcatatcgtattttccttccgcgatatcacttccatgacgacaggatagtctgagggttatctgtcacagatttgagggtggttcgtcacatttgttctgacctactgagggtaatttgtcacagttttgctgtttccttcagcctgcatggattttctcatactttttgaactgtaatttttaaggaagccaaatttgagggcagtttgtcacagttgatttccttctctttcccttcgtcatgtgacctgatatcgggggttagttcgtcatcattgatgagggttgattatcacagtttattactctgaattggctatccgcgtgtgtacctctacctggagtttttcccacggtggatatttcttcttgcgctgagcgtaagagctatctgacagaacagttcttctttgcttcctcgccagttcgctcgctatgctcggttacacggctgcggcg

SEQ ID NO: 4 - DNA, 35283 bp, Artificial Sequence
  Clone pCCI-4K-SARS-CoV-2-DDDWW. Based on SARS-CoV-2.
gatgtgctgcaaggcgattaagttgggtaacgccagggttttcccagtcacgacgttgtaaaacgacggccagtgaattgtaatacgactcactatagggcgaattctagttattaatagtaatcaattacggggtcattagttcatagcccatatatggagttccgcgttacataacttacggtaaatggcccgcctggctgaccgcccaacgacccccgcccattgacgtcaataatgacgtatgttcccatagtaacgccaatagggactttccattgacgtcaatgggtggagtatttacggtaaactgcccacttggcagtacatcaagtgtatcatatgccaagtacgccccctattgacgtcaatgacggtaaatggcccgcctggcattatgcccagtacatgaccttatgggactttcctacttggcagtacatctacgtattagtcatcgctattaccatggtgatgcggttttggcagtacatcaatgggcgtggatagcggtttgactcacggggatttccaagtctccaccccattgacgtcaatgggagtttgttttggcaccaaaatcaacgggactttccaaaatgtcgtaacaactccgccccattgacgcaaatgggcggtaggcgtgtacggtgggaggtctatataagcagagctggtttagtgaaccgtattaaaggtttataccttcccaggtaacaaaccaaccaactttcgatctcttgtagatctgttctctaaacgaactttaaaatctgtgtggctgtcactcggctgcatgcttagtgcactcacgcagtataattaataactaattactgtcgttgacaggacacgagtaactcgtctatcttctgcaggctgcttacggtttcgtccgtgttgcagccgatcatcagcacatctaggtttcgtccgggtgtgaccgaaaggtaagatggagagccttgtccctggtttcaacgagaaaacacacgtccaactcagtttgcctgttttacaggttcgcgacgtgctcgtacgtggctttggagactccgtggaggaggtcttatcagaggcacgtcaacatcttaaagatggcacttgtggcttagtagaagttgaaaaaggcgttttgcctcaacttgaacagccctatgtgttcatcaaacgttcggatgctcgaactgcacctcatggtcatgttatggttgagctggtagcagaactcgaaggcattcagtacggtcgtagtggtgagacacttggtgtccttgtccctcatgtgggcgaaataccagtggcttaccgcaaggttcttcttcgtaagaacggtaataaaggagctggtggccatagttacggcgccgatctaaagtcatttgacttaggcgacgagcttggcactgatccttatgaagattttcaagaaaactggaacactaaacatagcagtggtgttacccgtgaactcatgcgtgagcttaacggaggggcatacactcgctatgtcgataacaacttctgtggccctgatggctaccctcttgagtgcattaaagaccttctagcacgtgctggtaaagcttcatgcactttgtccgaacaactggactttattgacactaagaggggtgtatactgctgccgtgaacatgagcatgaaattgcttggtacacggaacgttctgaaaagagctatgaattgcagacaccttttgaaattaaattggcaaagaaatttgacaccttcaatggggaatgtccaaattttgtatttcccttaaattccataatcaagactattcaaccaagggttgaaaagaaaaagcttgatggctttatgggtagaattcgatctgtctatccagttgcgtcaccaaatgaatgcaaccaaatgtgcctttcaactctcatgaagtgtgatcattgtggtgaaacttcatggcagacgggcgattttgttaaagccacttgcgaattttgtggcactgagaatttgactaaagaaggtgccactacttgtggttacttaccccaaaatgctgttgttaaaatttattgtccagcatgtcacaattcagaagtaggacctgagcatagtcttgccgaataccataatgaatctggcttgaaaaccattcttcgtaagggtggtcgcactattgcctttggaggctgtgtgttctcttatgttggttgccataacaagtgtgcctattgggtcccgcgtgcgagtgcgaacataggttgtaatcatacgggtgtagtaggtgaaggttcggaaggtctaaatgataatctactagaaatactacaaaaagaaaaagtaaatataaatatagtaggtgattttaaactaaatgaagaaatagcgataatattagcgtcgttttcggcgtcgacgagtgcgtttgtagaaacggtaaaaggtttagattataaagcgtttaaacaaatagtagaatcgtgtggtaattttaaagtgacgaaaggtaaagcgaaaaaaggtgcgtggaatataggtgaacaaaaatcgatactaagtccgctatatgcgtttgcgtcggaagcggcgcgtgtagtacgttcgatattttcgcgtacgctagaaacggcgcaaaattcggtacgtgtattacaaaaagcggcgataacgatactagatggtatatcgcaatattcgctacgtctaatagatgcgatgatgtttacgtcggatttagcgacgaataatctagtagtaatggcgtatataacgggtggtgtagtacaattaacgtcgcaatggctaacgaatatatttggtacggtatatgaaaaactaaaaccggtactagattggctagaagaaaaatttaaagaaggtgtagaatttctacgtgatggttgggaaatagtaaaatttatatcgacgtgtgcgtgtgaaatagtaggtggtcaaatagtaacgtgtgcgaaagaaataaaagaatcggtacaaacgttttttaaactagtaaataaatttctagcgctatgtgcggattcgataataataggtggtgcgaaactaaaagcgctaaatctaggtgaaacgtttgtgacgcattcgaaaggtttatatcgtaaatgtgtaaaatcgcgtgaagaaacgggtctactaatgccgctaaaagcgccgaaagaaataatatttttagaaggtgaaacgctaccgacggaagtattaacggaagaagtagtattaaaaacgggtgatttacaaccgttagaacaaccgacgtcggaagcggtagaagcgccgttagtaggtacgccggtatgtataaatggtctaatgttactagaaataaaagatacggaaaaatattgtgcgctagcgccgaatatgatggtaacgaataatacgtttacgctaaaaggtggtgcgccgacgaaagtaacgtttggtgatgatacggtaatagaagtacaaggttataaatcggtaaatataacgtttgaactagatgaacgtatagataaagtactaaatgaaaaatgttcggcgtatacggtagaactaggtacggaagtaaatgaatttgcgtgtgtagtagcggatgcggtaataaaaacgttacaaccggtatcggaattactaacgccgctaggtatagatttagatgaatggtcgatggcgacgtattatttatttgatgaatcgggtgaatttaaattagcgtcgcatatgtattgttcgttttatccgccggatgaagatgaagaagaaggtgattgtgaagaagaagaatttgaaccgtcgacgcaatatgaatatggtacggaagatgattatcaaggtaaaccgttagaatttggtgcgacgtcggcggcgctacaaccggaagaagaacaagaagaagattggttggatgatgattcgcaacaaacggtaggtcaacaagatggttcggaagataatcaaacgacgacgatacaaacgatagtagaagtacaaccgcaattagaaatggaactaacgccggtagtacaaacgatagaagtaaattcgttttcgggttatttaaaactaacggataatgtatatataaaaaatgcggatatagtagaagaagcgaaaaaagtaaaaccgacggtagtagtaaatgcggcgaatgtatatctaaaacatggtggtggtgtagcgggtgcgttaaataaagcgacgaataatgcgatgcaagtagaatcggatgattatatagcgacgaatggtccgctaaaagtaggtggttcgtgtgtattatcgggtcataatctagcgaaacattgtctacatgtagtaggtccgaatgtaaataaaggtgaagatatacaactactaaaatcggcgtatgaaaattttaatcaacatgaagtactactagcgccgttattatcggcgggtatatttggtgcggacccgatacattcgttacgtgtgtgtgtagatacggtacgcacgaatgtatatttagcggtatttgataaaaatctatatgataaactagtatcgtcgtttttagaaatgaaatcggaaaaacaagtagaacaaaaaatagcggaaataccgaaagaagaagtaaaaccgtttataacggaatcgaaaccgtcggtagaacaacgtaaacaagatgataaaaaaataaaagcgtgtgtagaagaagtaacgacgacgctagaagaaacgaaatttctaacagaaaatttattactatatatagatataaatggtaatctacatccggattcggcgacgctagtatcggatatagatataacgtttttaaaaaaagatgcgccgtatatagtaggtgatgtagtacaagaaggtgtattaacggcggtagtaataccgacgaaaaaagcgggtggtacgacggaaatgctggcgaaagcgttacgtaaagtaccgacggataattatataacgacgtacccgggtcaaggtttaaatggttatacggtagaagaagcgaaaacggtactaaaaaaatgtaaatcggcgttttatatactaccgtcgataatatcgaatgaaaaacaagaaatactaggtacggtatcgtggaatttacgtgaaatgctagcgcatgcggaagaaacacgtaaattaatgccggtatgtgtagaaacgaaagcgatagtatcgacgatacaacgtaaatataaaggtataaaaatacaagaaggtgtagtagattatggtgcgcgtttttatttttatacgtcgaaaacgacggtagcgtcgctaataaatacgctaaatgatctaaatgaaacgctagtaacgatgccgctaggttatgtaacgcatggtttaaatttagaagaagcggcgcgttatatgcgttcgctaaaagtaccggcgacggtatcggtatcgtcgccggatgcggtaacggcgtataatggttatctaacgtcgtcgtcgaaaacgccggaagaacattttatagaaacgatatcgctagcgggttcgtataaagattggtcgtattcgggtcaatcgacgcaactaggtatagaatttctaaaacgtggtgataaatcggtatattatacgtcgaatccgacgacgtttcatctagatggtgaagtaataacgtttgataatctaaaaacgctactatcgttacgtgaagtacgtacgataaaagtatttacgacggtagataatataaatctacatacgcaagtagtagatatgtcgatgacatatggacaacaatttggtccgacgtatttagatggtgcggatgttacgaaaataaaaccgcataattcgcatgaaggtaaaacgttttatgtattaccgaatgatgatacgctacgtgtagaagcgtttgaatattatcatacgactgatccgtcgtttctaggtcgttatatgtcggcgttaaatcatacgaaaaaatggaaatatccgcaagtaaatggtttaacgtcgataaaatgggcggataataattgttatctagcgacggcgttattaacgctacaacaaatagaattaaaatttaatccgccggcgctacaagatgcgtattatcgtgcgcgtgcgggtgaagcggcgaatttttgtgcgctaatattagcgtattgtaataaaacggtaggtgaattaggtgatgtacgtgaaacgatgtcgtatttatttcaacatgcgaatttagattcgtgtaaacgtgtattaaatgtagtatgtaaaacgtgtggtcaacaacaaacgacgctaaaaggtgtagaagcggtaatgtatatgggtacgctatcgtatgaacaatttaaaaaaggtgtacaaataccgtgtacgtgtggtaaacaagcgacgaaatatctagtacaacaagaatcgccgtttgtaatgatgtcggcgccgccggcgcaatatgaactaaaacatggtacgtttacgtgtgcgtcggaatatacgggtaattatcaatgtggtcattataaacatataacgtcgaaagaaacgttatattgtatagatggtgcgttacttacgaaatcgtcggaatataaaggtccgataacggatgtattttataaagaaaattcgtatacgacgacgataaaaccggtaacgtataaattagatggtgtagtatgtacggaaatagatccgaaattagataattattataaaaaagataattcgtattttacggaacaaccgatagatctagtaccgaatcaaccatatccgaatgcgtcgtttgataattttaaatttgtatgtgataatataaaatttgcggatgatttaaatcaattaacgggttataaaaaaccggcgtcgcgtgaactaaaagtaacgttttttccggatttaaatggtgatgtagtagcgatagattataaacattatacgccgtcgtttaaaaaaggtgcgaaattattacataaaccgatagtatggcatgtaaataatgcgacgaataaagcgacgtataaaccgaatacgtggtgtatacggtgtctatggagcacgaaaccggtagaaacgtcgaattcgtttgatgtactaaaatcggaagatgcgcaaggtatggataatctagcgtgtgaagatctaaaaccggtatcggaagaagtagtagaaaatccgacgatacaaaaagatgtactggaatgtaatgtaaaaacgacggaagtagtaggtgatataatactaaaaccggctaataattcgttaaaaataacggaagaagtaggtcatacggatctaatggcggcgtatgtagataattcgtcgctaacgataaaaaaaccgaatgaattatcgcgtgtattaggtttaaaaacgctagcgacgcatggtttagctgctgtaaattcggtaccgtgggatacgatagcgaattatgcgaaaccgtttctaaataaagtagtatcgacgacgacgaatatagtaacgcgatgtttaaatcgtgtatgtacgaattatatgccgtatttttttacgttattactacaattatgtacgtttacgcgatcgacgaattcgcgtataaaagcgtcgatgccgacgacgatagcgaaaaatacggtaaaatcggtaggtaaattttgtctagaagcgtcgtttaattatttaaaatcgccgaatttttctaaactaataaatataataatatggtttttactattatcggtatgcctaggttcgttaatatattcgacggcggcgttaggtgtattaatgtcgaatttaggtatgccgtcgtattgtacgggttatcgtgaaggttatttaaattcgacgaatgtaacgatagcgacgtattgtacgggttcgataccgtgttcggtatgtctatcgggtttagattcgttagatacgtatccgtcgttagaaacgatacaaataacgatatcgtcgtttaaatgggatttaacggcgtttggtttagtagcggaatggtttttagcgtatatactatttacgcgatttttttatgtactaggtttagcggcgataatgcaattatttttttcgtattttgcggtacattttatttcgaattcgtggctaatgtggttaataataaatctagtacaaatggcgccgatatcggcgatggtacgtatgtatatattttttgcgtcgttttattatgtatggaaatcgtatgtacatgtagtagatggttgtaattcgtcgacgtgtatgatgtgttataaacgtaatcgtgcgacgcgagtagaatgtacgacgatagtaaatggtgtacgtcgttcgttttatgtatatgcgaatggtggtaaaggtttttgtaaactacataattggaattgtgtaaattgtgatacgttttgtgcgggttcgacgtttatatcggatgaagtagcgcgtgatttatcgctacaatttaaacgtccgataaatccgacggatcaatcgtcgtatatagtagattcggtaacggtaaaaaatggttcgatacatctatattttgataaagcgggtcaaaaaacgtatgaacgtcattcgctatcgcattttgtaaatttagataatctacgtgcgaataatacgaaaggttcgttaccgataaatgtaatagtatttgatggtaaatcgaaatgtgaagaatcgtcggcgaaatcggcgtcggtatattattcgcaactaatgtgtcaaccgatactattactagatcaagcgttagtatcggatgtaggtgattcggcggaagtagcggtaaaaatgtttgatgcgtatgtaaatacgttttcgtcgacgtttaatgtaccgatggaaaaactaaaaacgctagtagcgacggcggaagcggaactagcgaaaaatgtatctttagataatgtattatcgacgtttatatcggcggcgcgtcaaggttttgtagattcggatgtagaaacgaaagatgtagtagaatgtctaaaattatcgcatcaatcggatatagaagtaacgggtgattcgtgtaataattatatgctaacgtataataaagtagaaaatatgacgccgcgtgatctaggtgcgtgtatagattgttcggcgcgtcatataaatgcgcaagtagcgaaatcgcataatatagcgttaatatggaatgtaaaagattttatgtcgttatcggaacaactacgtaaacaaatacgttcggcggcgaaaaaaaataatttaccgtttaaattaacgtgtgcgacgacgcgacaagtagtaaatgtagtaacgacgaaaatagcgctaaaaggtggtaaaatagtaaataattggttaaaacaattaattaaagttacacttgtgttcctttttgttgctgctattttctatttaataacacctgttcatgtcatgtctaaacatactgacttttcaagtgaaatcataggatacaaggctattgatggtggtgtcactcgtgacatagcatctacagatacttgttttgctaacaaacatgctgattttgacacatggtttagccagcgtggtggtagttatactaatgacaaagcttgcccattgattgctgcagtcataacaagagaagtgggttttgtcgtgcctggtttgcctggcacgatattacgcacaactaatggtgactttttgcatttcttacctagagtttttagtgcagttggtaacatctgttacacaccatcaaaacttatagagtacactgactttgcaacatcagcttgtgttttggctgctgaatgtacaatttttaaagatgcttctggtaagccagtaccatattgttatgataccaatgtactagaaggttctgttgcttatgaaagtttacgccctgacacacgttatgtgctcatggatggctctattattcaatttcctaacacctaccttgaaggttctgttagagtggtaacaacttttgattctgagtactgtaggcacggcacttgtgaaagatcagaagctggtgtttgtgtatctactagtggtagatgggtacttaacaatgattattacagatctttaccaggagttttctgtggtgtagatgctgtaaatttacttactaatatgtttacaccactaattcaacctattggtgctttggacatatcagcatctatagtagctggtggtattgtagctatcgtagtaacatgccttgcctactattttatgaggtttagaagagcttttggtgaatacagtcatgtagttgcctttaatactttactattccttatgtcattcactgtactctgtttaacaccagtttactcattcttacctggtgtttattctgttatttacttgtacttgacattttatcttactaatgatgtttcttttttagcacatattcagtggatggttatgttcacacctttagtacctttctggataacaattgcttatatcatttgtatttccacaaagcatttctattggttctttagtaattacctaaagagacgtgtagtctttaatggtgtttcctttagtacttttgaagaagctgcgctgtgcacctttttgttaaataaagaaatgtatctaaagttgcgtagtgatgtgctattacctcttacgcaatataatagatacttagctctttataataagtacaagtattttagtggagcaatggatacaactagctacagagaagctgcttgttgtcatctcgcaaaggctctcaatgacttcagtaactcaggttctgatgttctttaccaaccaccacaaacctctatcacctcagctgttttgcagagtggttttagaaaaatggcattcccatctggtaaagttgagggttgtatggtacaagtaacttgtggtacaactacacttaacggtctttggcttgatgacgtagtttactgtccaagacatgtgatctgcacctctgaagacatgcttaaccctaattatgaagatttactcattcgtaagtctaatcataatttcttggtacaggctggtaatgttcaactcagggttattggacattctatgcaaaattgtgtacttaagcttaaggttgatacagccaatcctaagacacctaagtataagtttgttcgcattcaaccaggacagactttttcagtgttagcttgttacaatggttcaccatctggtgtttaccaatgtgctatgaggcccaatttcactattaagggttcattccttaatggttcatgtggtagtgttggttttaacatagattatgactgtgtctctttttgttacatgcaccatatggaattaccaactggagttcatgctggcacagacttagaaggtaacttttatggaccttttgttgacaggcaaacagcacaagcagctggtacggacacaactattacagttaatgttttagcttggttgtacgctgctgttataaatggagacaggtggtttctcaatcgatttaccacaactcttaatgactttaaccttgtggctatgaagtacaattatgaacctctaacacaagaccatgttgacatactaggacctctttctgctcaaactggaattgccgttttagatatgtgtgcttcattaaaagaattactgcaaaatggtatgaatggacgtaccatattgggtagtgctttattagaagatgaatttacaccttttgatgttgttagacaatgctcaggtgttactttccaaagtgcagtgaaaagaacaatcaagggtacacaccactggttgttactcacaattttgacttcacttttagttttagtccagagtactcaatggtctttgttcttttttttgtatgaaaatgcctttttaccttttgctatgggtattattgctatgtctgcttttgcaatgatgtttgtcaaacataagcatgcatttctctgtttgtttttgttaccttctcttgccactgtagcttattttaatatggtctatatgcctgctagttgggtgatgcgtattatgacatggttggatatggttgatactagtttgtctggttttaagctaaaagactgtgttatgtatgcatcagctgtagtgttactaatccttatgacagcaagaactgtgtatgatgatggtgctaggagagtgtggacacttatgaatgtcttgacactcgtttataaagtttattatggtaatgctttagatcaagccatttccatgtgggctcttataatctctgttacttctaactactcaggtgtagttacaactgtcatgtttttggccagaggtattgtttttatgtgtgttgagtattgccctattttcttcataactggtaatacacttcagtgtataatgctagtttattgtttcttaggctatttttgtacttgttactttggcctcttttgtttactcaaccgctactttagactgactcttggtgtttatgattacttagtttctacacaggagtttagatatatgaattcacagggactactcccacccaagaatagcatagatgccttcaaactcaacattaaattgttgggtgttggtggcaaaccttgtatcaaagtagccactgtacagtctaaaatgtcagatgtaaagtgcacatcagtagtcttactctcagttttgcaacaactcagagtagaatcatcatctaaattgtgggctcaatgtgtccagttacacaatgacattctcttagctaaagatactactgaagcctttgaaaaaatggtttcactactttctgttttgctttccatgcagggtgctgtagacataaacaagctttgtgaagaaatgctggacaacagggcaaccttacaagctatagcctcagagtttagttcccttccatcatatgcagcttttgctactgctcaagaagcttatgagcaggctgttgctaatggtgattctgaagttgttcttaaaaagttgaagaagtctttgaatgtggctaaatctgaatttgaccgtgatgcagccatgcaacgtaagttggaaaagatggctgatcaagctatgacccaaatgtataaacaggctagatctgaggacaagagggcaaaagttactagtgctatgcagacaatgcttttcactatgcttagaaagttggataatgatgcactcaacaacattatcaacaatgcaagagatggttgtgttcccttgaacataatacctcttacaacagcagccaaactaatggttgtcataccagactataacacatataaaaatacgtgtgatggtacaacatttacttatgcatcagcattgtgggaaatccaacaggttgtagatgcagatagtaaaattgttcaacttagtgaaattagtatggacaattcacctaatttagcatggcctcttattgtaacagctttaagggccaattctgctgtcaaattacagaataatgagcttagtcctgttgcactacgacagatgtcttgtgctgccggtactacacaaactgcttgcactgatgacaatgcgttagcttactacaacacaacaaagggaggtaggtttgtacttgcactgttatccgatttacaggatttgaaatgggctagattccctaagagtgatggaactggtactatctatacagaactggaaccaccttgtaggtttgttacagacacacctaaaggtcctaaagtgaagtatttatactttattaaaggattaaacaacctaaatagaggtatggtacttggtagtttagctgccacagtacgtctacaagctggtaatgcaacagaagtgcctgccaattcaactgtattatctttctgtgcttttgctgtagatgctgctaaagcttacaaagattatctagctagtgggggacaaccaatcactaattgtgttaagatgttgtgtacacacactggtactggtcaggcaataacagttacaccggaagccaatatggatcaagaatcctttggtggtgcatcgtgttgtctgtactgccgttgccacatagatcatccaaatcctaaaggattttgtgacttaaaaggtaagtatgtacaaatacctacaacttgtgctaatgaccctgtgggttttacacttaaaaacacagtctgtaccgtctgcggtatgtggaaaggttatggctgtagttgtgatcaactccgcgaacccatgcttcagtcagctgatgcacaatcgtttttaaacgggtttgcggtgtaagtgcagcccgtcttacaccgtgcggcacaggcactagtactgatgtcgtatacagggcttttgacatctacaatgataaagtagctggttttgctaaattcctaaaaactaattgttgtcgcttccaagaaaaggacgaagatgacaatttaattgattcttactttgtagttaagagacacactttctctaactaccaacatgaagaaacaatttataatttacttaaggattgtccagctgttgctaaacatgacttctttaagtttagaatagacggtgacatggtaccacatatatcacgtcaacgtcttactaaatacacaatggcagacctcgtctatgctttaaggcattttgatgaaggtaattgtgacacattaaaagaaatacttgtcacatacaattgttgtgatgatgattatttcaataaaaaggactggtatgattttgtagaaaacccagatatattacgcgtatacgccaacttaggtgaacgtgtacgccaagctttgttaaaaacagtacaattctgtgatgccatgcgaaatgctggtattgttggtgtactgacattagataatcaagatctcaatggtaactggtatgatttcggtgatttcatacaaaccacgccaggtagtggagttcctgttgtagattcttattattcattgttaatgcctatattaaccttgaccagggctttaactgcagagtcacatgttgacactgacttaacaaagccttacattaagtgggatttgttaaaatatgacttcacggaagagaggttaaaactctttgaccgttattttaaatattgggatcagacataccacccaaattgtgttaactgtttggatgacagatgcattctgcattgtgcaaactttaatgttttattctctacagtgttcccacctacaagttttggaccactagtgagaaaaatatttgttgatggtgttccatttgtagtttcaactggataccacttcagagagctaggtgttgtacataatcaggatgtaaacttacatagctctagacttagttttaaggaattacttgtgtatgctgctgaccctgctatgcacgctgcttctggtaatctattactagataaacgcactacgtgcttttcagtagctgcacttactaacaatgttgcttttcaaactgtcaaacccggtaattttaacaaagacttctatgactttgctgtgtctaagggtttctttaaggaaggaagttctgttgaattaaaacacttcttctttgctcaggatggtaatgctgctatcagcgattatgactactatcgttataatctaccaacaatgtgtgatatcagacaactactatttgtagttgaagttgttgataagtactttgattgttacgatggtggctgtattaatgctaaccaagtcatcgtcaacaacctagacaaatcagctggttttccatttaataaatggggtaaggctagactttattatgattcaatgagttatgaggatcaagatgcacttttcgcatatacaaaacgtaatgtcatccctactataactcaaatgaatcttaagtatgccattagtgcaaagaatagagctcgcaccgtagctggtgtctctatctgtagtactatgaccaatagacagtttcatcaaaaattattgaaatcaatagccgccactagaggagctactgtagtaattggaacaagcaaattctatggtggttggcacaacatgttaaaaactgtttatagtgatgtagaaaaccctcaccttatgggttgggattatcctaaatgtgatagagccatgcctaacatgcttagaattatggcctcacttgttcttgctcgcaaacatacaacgtgttgtagcttgtcacaccgtttctatagattagctaatgagtgtgctcaagtattgagtgaaatggtcatgtgtggcggttcactatatgttaaaccaggtggaacctcatcaggagatgccacaactgcttatgctaatagtgtttttaacatttgtcaagctgtcacggccaatgttaatgcacttttatctactgatggtaacaaaattgccgataagtatgtccgcaatttacaacacagactttatgagtgtctctatagaaatagagatgttgacacagactttgtgaatgagttttacgcatatttgcgtaaacatttctcaatgatgatactctctgacgatgctgttgtgtgtttcaatagcacttatgcatctcaaggtctagtggctagcataaagaactttaagtcagttctttattatcaaaacaatgtttttatgtctgaagcaaaatgttggactgagactgaccttactaaaggacctcatgaattttgctctcaacatacaatgctagttaaacagggtgatgattatgtgtaccttccttacccagatccatcaagaatcctaggggccggctgttttgtagatgatatcgtaaaaacagatggtacacttatgattgaacggttcgtgtctttagctatagatgcttacccacttactaaacatcctaatcaggagtatgctgatgtctttcatttgtacttacaatacataagaaagctacatgatgagttaacaggacacatgttagacatgtattctgttatgcttactaatgataacacttcaaggtattgggaacctgagttttatgaggctatgtacacaccgcatacagtcttacaggctgttggggcttgtgttctttgcaattcacagacttcattaagatgtggtgcttgcatacgtagaccattcttatgttgtaaatgctgttacgaccatgtcatatcaacatcacataaattagtcttgtctgttaatccgtatgtttgcaatgctccaggttgtgatgtcacagatgtgactcaactttacttaggaggtatgagctattattgtaaatcacataaaccacccattagttttccattgtgtgctaatggacaagtttttggtttatataaaaatacatgtgttggtagcgataatgttactgactttaatgcaattgcaacatgtgactggacaaatgctggtgattacattttagctaacacctgtactgaaagactcaagctttttgcagcagaaacgctcaaagctactgaggagacatttaaactgtcttatggtattgctactgtacgtgaagtgctgtctgacagagaattacatctttcatgggaagttggtaaacctagaccaccacttaaccgaaattatgtctttactggttatcgtgtaactaaaaacagtaaagtacaaataggagagtacacctttgaaaaaggtgactatggtgatgctgttgtttaccgaggtacaacaacttacaaattaaatgttggtgattattttgtgctgacatcacatacagtaatgccattaagtgcacctacactagtgccacaagagcactatgttagaattactggcttatacccaacactcaatatctcagatgagttttctagcaatgttgcaaattatcaaaaggttggtatgcaaaagtattctacactccagggaccacctggtactggtaagagtcattttgctattggcctagctctctactacccttctgctcgcatagtgtatacagcttgctctcatgccgctgttgatgcactatgtgagaaggcattaaaatatttgcctatagataaatgtagtagaattatacctgcacgtgctcgtgtagagtgttttgataaattcaaagtgaattcaacattagaacagtatgtcttttgtactgtaaatgcattgcctgagacgacagcagatatagttgtctttgatgaaatttcaatggccacaaattatgatttgagtgttgtcaatgccagattacgtgctaagcactatgtgtacattggcgaccctgctcaattacctgcaccacgcacattgctaactaagggcacactagaaccagaatatttcaattcagtgtgtagacttatgaaaactataggtccagacatgttcctcggaacttgtcggcgttgtcctgctgaaattgttgacactgtgagtgctttggtttatgataataagcttaaagcacataaagacaaatcagctcaatgctttaaaatgttttataagggtgttatcacgcatgatgtttcatctgcaattaacaggccacaaataggcgtggtaagagaattccttacacgtaaccctgcttggagaaaagctgtctttatttcaccttataattcacagaatgctgtagcctcaaagattttgggactaccaactcaaactgttgattcatcacagggctcagaatatgactatgtcatattcactcaaaccactgaaacagctcactcttgtaatgtaaacagatttaatgttgctattaccagagcaaaagtaggcatactttgcataatgtctgatagagacctttatgacaagttgcaatttacaagtcttgaaattccacgtaggaatgtggcaactttacaagctgaaaatgtaacaggactctttaaagattgtagtaaggtaatcactgggttacatcctacacaggcacctacacacctcagtgttgacactaaattcaaaactgaaggtttatgtgttgacatacctggcatacctaaggacatgacctatagaagactcatctctatgatgggttttaaaatgaattatcaagttaatggttaccctaacatgtttatcacccgcgaagaagctataagacatgtacgtgcatggattggcttcgatgtcgaggggtgtcatgctactagagaagctgttggtaccaatttacctttacagctaggtttttctacaggtgttaacctagttgctgtacctacaggttatgttgatacacctaataatacagatttttccagagttagtgctaaaccaccgcctggagatcaatttaaacacctcataccacttatgtacaaaggacttccttggaatgtagtgcgtataaagattgtacaaatgttaagtgacacacttaaaaatctctctgacagagtcgtatttgtcttatgggcacatggctttgagttgacatctatgaagtattttgtgaaaataggacctgagcgcacctgttgtctatgtgatagacgtgccacatgcttttccactgcttcagacacttatgcctgttggcatcattctattggatttgattacgtctataatccgtttatgattgatgttcaacaatggggttttacaggtaacctacaaagcaaccatgatctgtattgtcaagtccatggtaatgcacatgtagctagttgtgatgcaatcatgactaggtgtctagctgtccacgagtgctttgttaagcgtgttgactggactattgaatatcctataattggtgatgaactgaagattaatgcggcttgtagaaaggttcaacacatggttgttaaagctgcattattagcagacaaattcccagttcttcacgacattggtaaccctaaagctattaagtgtgtacctcaagctgatgtagaatggaagttctatgatgcacagccttgtagtgacaaagcttataaaatagaagaattattctattcttatgccacacattctgacaaattcacagatggtgtatgcctattttggaattgcaatgtcgatagatatcctgctaattccattgtttgtagatttgacactagagtgctatctaaccttaacttgcctggttgtgatggtggcagtttgtatgtaaataaacatgcattccacacaccagcttttgataaaagtgcttttgttaatttaaaacaattaccatttttctattactctgacagtccatgtgagtctcatggaaaacaagtagtgtcagatatagattatgtaccactaaagtctgctacgtgtataacacgttgcaatttaggtggtgctgtctgtagacatcatgctaatgagtacagattgtatctcgatgcttataacatgatgatctcagctggctttagcttgtgggtttacaaacaatttgatacttataacctctggaacacttttacaagacttcagagtttagaaaatgtggcttttaatgttgtaaataagggacactttgatggacaacagggtgaagtaccagtttctatcattaataacactgtttacacaaaagttgatggtgttgatgtagaattgtttgaaaataaaacaacattacctgttaatgtagcatttgagctttgggctaagcgcaacattaaaccagtaccagaggtgaaaatactcaataatttgggtgtggacattgctgctaatactgtgatctgggactacaaaagagatgctccagcacatatatctactattggtgtttgttctatgactgacatagccaagaaaccaactgaaacgatttgtgcaccactcactgtcttttttgatggtagagttgatggtcaagtagacttatttagaaatgcccgtaatggtgttcttattacagaaggtagtgttaaaggtttacaaccatctgtaggtcccaaacaagctagtcttaatggagtcacattaattggagaagccgtaaaaacacagttcaattattataagaaagttgatggtgttgtccaacaattacctgaaacttactttactcagagtagaaatttacaagaatttaaacccaggagtcaaatggaaattgatttcttagaattagctatggatgaattcattgaacggtataaattagaaggctatgccttcgaacatatcgtttatggagattttagtcatagtcagttaggtggtttacatctactgattggactagctaaacgttttaaggaatcaccttttgaattagaagattttattcctatggacagtacagttaaaaactatttcataacagatgcgcaaacaggttcatctaagtgtgtgtgttctgttattgatttattacttgatgattttgttgaaataataaaatcccaagatttatctgtagtttctaaggttgtcaaagtgactattgactatacagaaatttcatttatgctttggtgtaaagatggccatgtagaaacattttacccaaaattacaatctagtcaagcgtggcaaccgggtgttgctatgcctaatctttacaaaatgcaaagaatgctattagaaaagtgtgaccttcaaaattatggtgatagtgcaacattacctaaaggcataatgatgaatgtcgcaaaatatactcaactgtgtcaatatttaaacacattaacattagctgtaccctataatatgagagttatacattttggtgctggttctgataaaggagttgcaccaggtacagctgttttaagacagtggttgcctacgggtacgctgcttgtcgattcagatcttaatgactttgtctctgatgcagattcaactttgattggtgattgtgcaactgtacatacagctaataaatgggatctcattattagtgatatgtacgaccctaagactaaaaatgttacaaaagaaaatgactctaaagagggttttttcacttacatttgtgggtttatacaacaaaagctagctcttggaggttccgtggctataaagataacagaacattcttggaatgctgatctttataagctcatgggacacttcgcatggtggacagcctttgttactaatgtgaatgcgtcatcatctgaagcatttttaattggatgtaattatcttggcaaaccacgcgaacaaatagatggttatgtcatgcatgcaaattacatattttggaggaatacaaatccaattcagttgtcttcctattctttatttgacatgagtaaatttccccttaaattaaggggtactgctgttatgtctttaaaagaaggtcaaatcaatgatatgattttatctcttcttagtaaaggtagacttataattagagaaaacaacagagttgttatttctagtgatgttcttgttaacaactaaacgaacaatgtttgtttttcttgttttattgccactagtctctagtcagtgtgttaatcttacaaccagaactcaattaccccctgcatacactaattctttcacacgtggtgtttattaccctgacaaagttttcagatcctcagttttacattcaactcaggacttgttcttacctttcttttccaatgttacttggttccatgctatacatgtctctgggaccaatggtactaagaggtttgataaccctgtcctaccatttaatgatggtgtttattttgcttccactgagaagtctaacataataagaggctggatttttggtactactttagattcgaagacccagtccctacttattgttaataacgctactaatgttgttattaaagtctgtgaatttcaattttgtaatgatccatttttgggtgtttattaccacaaaaacaacaaaagttggatggaaagtgagttcagagtttattctagtgcgaataattgcacttttgaatatgtctctcagccttttcttatggaccttgaaggaaaacagggtaatttcaaaaatcttagggaatttgtgtttaagaatattgatggttattttaaaatatattctaagcacacgcctattaatttagtgcgtgatctcccccagggtttttcggctttagaaccattggtagatttgccaataggtattaacatcactaggtttcaaactttacttgctttacatagaagttatttgactcctggtgattcttcttcaggttggacagctggtgctgcagcttattatgtgggttatcttcaacctaggacttttctattaaaatataatgaaaatggaaccattacagatgctgtagactgtgcacttgaccctctctcagaaacaaagtgtacgttgaaatccttcactgtagaaaaaggaatctatcaaacttctaactttagagtccaaccaacagaatctattgttagatttcctaatattacaaacttgtgcccttttggtgaagtttttaacgccaccagatttgcatctgtttatgcttggaacaggaagagaatcagcaactgtgttgctgattattctgtcctatataattccgcatcattttccacttttaagtgttatggagtgtctcctactaaattaaatgatctctgctttactaatgtctatgcagattcatttgtaattagaggtgatgaagtcagacaaatcgctccagggcaaactggaaagattgctgattataattataaattaccagatgattttacaggctgcgttatagcttggaattctaacaatcttgattctaaggttggtggtaattataattacctgtatagattgtttaggaagtctaatctcaaaccttttgagagagatatttcaactgaaatctatcaggccggtagcacaccttgtaatggtgttgaaggttttaattgttactttcctttacaatcatatggtttccaacccactaatggtgttggttaccaaccatacagagtagtagtactttcttttgaacttctacatgcaccagcaactgtttgtggacctaaaaagtctactaatttggttaaaaacaaatgtgtcaatttcaacttcaatggtttaacaggcacaggtgttcttactgagtctaacaaaaagtttctgcctttccaacaatttggcagagacattgctgacactactgatgctgtccgtgatccacagacacttgagattcttgacattacaccatgttcttttggtggtgtcagtgttataacaccaggaacaaatacttctaaccaggttgctgttctttatcaggatgttaactgcacagaagtccctgttgctattcatgcagatcaacttactcctacttggcgtgtttattctacaggttctaatgtttttcaaacacgtgcaggctgtttaataggggctgaacatgtcaacaactcatatgagtgtgacatacccattggtgcaggtatatgcgctagttatcagactcagactaattctcctcggcgggcacgtagtgtagctagtcaatccatcattgcctacactatgtcacttggtgcagaaaattcagttgcttactctaataactctattgccatacccacaaattttactattagtgttaccacagaaattctaccagtgtctatgaccaagacatcagtagattgtacaatgtacatttgtggtgattcaactgaatgcagcaatcttttgttgcaatatggcagtttttgtacacaattaaaccgtgctttaactggaatagctgttgaacaagacaaaaacacccaagaagtttttgcacaagtcaaacaaatttacaaaacaccaccaattaaagattttggtggttttaatttttcacaaatattaccagatccatcaaaaccaagcaagaggtcatttattgaagatctacttttcaacaaagtgacacttgcagatgctggcttcatcaaacaatatggtgattgccttggtgatattgctgctagagacctcatttgtgcacaaaagtttaacggccttactgttttgccacctttgctcacagatgaaatgattgctcaatacacttctgcactgttagcgggtacaatcacttctggttggacctttggtgcaggtgctgcattacaaataccatttgctatgcaaatggcttataggtttaatggtattggagttacacagaatgttctctatgagaaccaaaaattgattgccaaccaatttaatagtgctattggcaaaattcaagactcactttcttccacagcaagtgcacttggaaaacttcaagatgtggtcaaccaaaatgcacaagctttaaacacgcttgttaaacaacttagctccaattttggtgcaatttcaagtgttttaaatgatatcctttcacgtcttgacaaagttgaggctgaagtgcaaattgataggttgatcacaggcagacttcaaagtttgcagacatatgtgactcaacaattaattagagctgcagaaatcagagcttctgctaatcttgctgctactaaaatgtcagagtgtgtacttggacaatcaaaaagagttgatttttgtggaaagggctatcatcttatgtccttccctcagtcagcacctcatggtgtagtcttcttgcatgtgacttatgtccctgcacaagaaaagaacttcacaactgctcctgccatttgtcatgatggaaaagcacactttcctcgtgaaggtgtctttgtttcaaatggcacacactggtttgtaacacaaaggaatttttatgaaccacaaatcattactacagacaacacatttgtgtctggtaactgtgatgttgtaataggaattgtcaacaacacagtttatgatcctttgcaacctgaattagactcattcaaggaggagttagataaatattttaagaatcatacatcaccagatgttgatttaggtgacatctctggcattaatgcttcagttgtaaacattcaaaaagaaattgaccgcctcaatgaggttgccaagaatttaaatgaatctctcatcgatctccaagaacttggaaagtatgagcagtatataaaatggccatggtacatttggctaggttttatagctggcttgattgccatagtaatggtgacaattatgctttgctgtatgaccagttgctgtagttgtctcaagggctgttgttcttgtggatcctgctgcaaatttgatgaagacgactctgagccagtgctcaaaggagtcaaattacattacacataaacgaacttatggatttgtttatgagaatcttcacaattggaactgtaactttgaagcaaggtgaaatcaaggatgctactccttcagattttgttcgcgctactgcaacgataccgatacaagcctcactccctttcggatggcttattgttggcgttgcacttcttgctgtttttcagagcgcttccaaaatcataaccctcaaaaagagatggcaactagcactctccaagggtgttcactttgtttgcaacttgctgttgttgtttgtaacagtttactcacaccttttgctcgttgctgctggccttgaagccccttttctctatctttatgctttagtctacttcttgcagagtataaactttgtaagaataataatgaggctttggctttgctggaaatgccgttccaaaaacccattactttatgatgccaactattttctttgctggcatactaattgttacgactattgtataccttacaatagtgtaacttcttcaattgtcattacttcaggtgatggcacaacaagtcctatttctgaacatgactaccagattggtggttatactgaaaaatgggaatctggagtaaaagactgtgttgtattacacagttacttcacttcagactattaccagctgtactcaactcaattgagtacagacactggtgttgaacatgttaccttcttcatctacaataaaattgttgatgagcctgaagaacatgtccaaattcacacaatcgacggttcatccggagttgttaatccagtaatggaaccaatttatgatgaaccgacgacgactactagcgtgcctttgtaagcacaagctgatgagtacgaacttatgtactcattcgtttcggaagagacaggtacgttaatagttaatagcgtacttctttttcttgctttcgtggtattcttgctagttacactagccatccttactgcgcttcgattgtgtgcgtactgctgcaatattgttaacgtgagtcttgtaaaaccttctttttacgtttactctcgtgttaaaaatctgaattcttctagagttcctgatcttctggtctaaacgaactaaatattatattagtttttctgtttggaactttaattttagccatggcagattccaacggtactattaccgttgaagagcttaaaaagctccttgaacaatggaacctagtaataggtttcctattccttacatggatttgtcttctacaatttgcctatgccaacaggaataggtttttgtatataattaagttaattttcctctggctgttatggccagtaactttagcttgttttgtgcttgctgctgtttacagaataaattggatcaccggtggaattgctatcgcaatggcttgtcttgtaggcttgatgtggctcagctacttcattgcttctttcagactgtttgcgcgtacgcgatccatgtggtcattcaatccagaaactaacattcttctcaacgtgccactccatggcactattctgaccagaccgcttctagaaagtgaactcgtaatcggagctgtgatccttcgtggacatcttcgtattgctggacaccatctaggacgctgtgacatcaaggacctgcctaaagaaatcactgttgctacatcacgaacgctttcttattacaaattgggagcttcgcagcgtgtagcaggtgactcaggttttgctgcatacagtcgctacaggattggcaactataaattaaacacagaccattccagtagcagtgacaatattgctttgcttgtacagtaagtgacaacagatgtttcatctcgttgactttcaggttactatagcagagatattactaattattatgaggacttttaaagtttccatttggaatcttgattacatcataaacctcataattaaaaatttatctaagtcactaactgagaataaatattctcaattagatgaagagcaaccaatggagattgattaaacgaacatgaaaattattcttttcttggcactgataacactcgctacttgtgagctttatcactaccaagagtgtgttagaggtacaacagtacttttaaaagaaccttgctcttctggaacatacgagggcaattcaccatttcatcctctagctgataacaaatttgcactgacttgctttagcactcaatttgcttttgcttgtcctgacggcgtaaaacacgtctatcagttacgtgccagatcagtttcacctaaactgttcatcagacaagaggaagttcaagaactttactctccaatttttcttattgttgcggcaatagtgtttataacactttgcttcacactcaaaagaaagacagaatgattgaactttcattaattgacttctatttgtgctttttagcctttctgctattccttgttttaattatgcttattatcttttggttctcacttgaactgcaagatcataatgaaacttgtcacgcctaaacgaacatgaaatttcttgttttcttaggaatcatcacaactgtagctgcatttcaccaagaatgtagtttacagtcatgtactcaacatcaaccatatgtagttgatgacccgtgtcctattcacttctattctaaatggtatattagagtaggagctagaaaatcagcacctttaattgaattgtgcgtggatgaggctggttctaaatcacccattcagtacatcgatatcggtaattatacagtttcctgtttaccttttacaattaattgccaggaacctaaattgggtagtcttgtagtgcgttgttcgttctatgaagactttttagagtatcatgacgttcgtgttgttttagatttcatctaaacgaacaaactaaaatgtctgataatggaccccaaaatcagcgaaatgcaccccgcattacgtttggtggaccctcagattcaactggcagtaaccagaatggagaacgcagtggggcgcgatcaaaacaacgtcggccccaaggtttacccaataatactgcgtcttggttcaccgctctcactcaacatggcaaggaagaccttaaattccctcgaggacaaggcgttccaattaacaccaatagcagtccagatgaccaaattggctactaccgaagagctaccagacgaattcgtggtggtgacggtaaaatgaaagatctcagtccaagatggtatttctactacctaggaactgggccagaagctggacttccctatggtgctaacaaagacggcatcatatgggttgcaactgagggagccttgaatacaccaaaagatcacattggcacccgcaatcctgctaacaatgctgcaatcgtgctacaacttcctcaaggaacaacattgccaaaaggcttctacgcagaagggagcagaggcggcagtcaagcctcttctcgttcctcatcacgtagtcgcaacagttcaagaaattcaactccaggcagcagtaggggaacttctcctgctagaatggctggcaatggcggtgatgctgctcttgctttgctgctgcttgacagattgaaccagcttgagagcaaaatgtctggtaaaggccaacaacaacaaggccaaactgtcactaagaaatctgctgctgaggcttctaagaagcctcggcaaaaacgtactgccactaaagcatacaatgtaacacaagctttcggcagacgtggtccagaacaaacccaaggaaattttggggaccaggaactaatcagacaaggaactgattacaaacattggccgcaaattgcacaatttgcccccagcgcttcagcgttcttcggaatgtcgcgcattggcatggaagtcacaccttcgggaacgtggttgacctacacaggtgccatcaaattggatgacaaagatccaaatttcaaagatcaagtcattttgctgaataagcatattgacgcatacaaaacattcccaccaacagagcctaaaaaggacaaaaagaagaaggctgatgaaactcaagccttaccgcagagacagaagaaacagcaaactgtgactcttcttcctgctgcagatttggatgatttctccaaacaattgcaacaatccatgagcagtgctgactcaactcaggcctaaactcatgcagaccacacaaggcagatgggctatataaacgttttcgcttttccgtttacgatatatagtctactcttgtgcagaatgaattctcgtaactacatagcacaagtagatgtagttaactttaatctcacatagcaatctttaatcagtgtgtaacattagggaggacttgaaagagccaccacattttcaccgaggccacgcggagtacgatcgagtgtacagtgaacaatgctagggagagctgcctatatggaagagccctaatgtgtaaaattaattttagtagtgctatccccatgtgattttaatagcttcttaggagaatgacaaaaaaaaaaaaaaaaaaaaaaaaaaaaaaaaaaaaaaaaaaaaaaaaaaaaaaaaaaagggtcggcatggcatctccacctcctcgcggtccgacctgggcatccgaaggaggacgcacgtccactcggatggctaagggagcagcacactggcggccgttactagggccgcgcccttcccaacagttgcgcagcctgaatggcgaatggagatccaatttttaagtgtataatgtgttaaactactgattctaattgtttgtgtattttagattcacagtcccaaggctcatttcaggcccctcagtcctcacagtctgttcatgatcataatcagccataccacatttgtagaggttttacttgctttaaaaaacctcccacacctccccctgaacctgaaacataaaatgaatgcaattgttgttgttaacttgtttattgcagcttataatggttacaaataaagcaatagcatcacaaatttcacaaataaagcatttttttcactgcattctagttgtggtttgtccaaactcatcaatgtatcttaaagcttgagtattctatagtctcacctaaatagcttggcgtaatcatggtcatagctgtttcctgtgtgaaattgttatccgctcacaattccacacaacatacgagccggaagcataaagtgtaaagcctggggtgcctaatgagtgagctaactcacattaattgcgttgcgctcactgcccgctttccagtcgggaaacctgtcgtgccagctgcattaatgaatcggccaacgcgaaccccttgcggccgcccgggccgtcgaccaattctcatgtttgacagcttatcatcgaatttctgccattcatccgcttattatcacttattcaggcgtagcaaccaggcgtttaagggcaccaataactgccttaaaaaaattacgccccgccctgccactcatcgcagtactgttgtaattcattaagcattctgccgacatggaagccatcacaaacggcatgatgaacctgaatcgccagcggcatcagcaccttgtcgccttgcgtataatatttgcccatggtgaaaacgggggcgaagaagttgtccatattggccacgtttaaatcaaaactggtgaaactcacccagggattggctgagacgaaaaacatattctcaataaaccctttagggaaataggccaggttttcaccgtaacacgccacatcttgcgaatatatgtgtagaaactgccggaaatcgtcgtggtattcactccagagcgatgaaaacgtttcagtttgctcatggaaaacggtgtaacaagggtgaacactatcccatatcaccagctcaccgtctttcattgccatacgaaattccggatgagcattcatcaggcgggcaagaatgtgaataaaggccggataaaacttgtgcttatttttctttacggtctttaaaaaggccgtaatatccagctgaacggtctggttataggtacattgagcaactgactgaaatgcctcaaaatgttctttacgatgccattgggatatatcaacggtggtatatccagtgatttttttctccattttagcttccttagctcctgaaaatctcgataactcaaaaaatacgcccggtagtgatcttatttcattatggtgaaagttggaacctcttacgtgccgatcaacgtctcattttcgccaaaagttggcccagggcttcccggtatcaacagggacaccaggatttatttattctgcgaagtgatcttccgtcacaggtatttattcgcgataagctcatggagcggcgtaaccgtcgcacaggaaggacagagaaagcgcggatctgggaagtgacggacagaacggtcaggacctggattggggaggcggttgccgccgctgctgctgacggtgtgacgttctctgttccggtcacaccacatacgttccgccattcctatgcgatgcacatgctgtatgccggtataccgctgaaagttctgcaaagcctgatgggacataagtccatcagttcaacggaagtctacacgaaggtttttgcgctggatgtggctgcccggcaccgggtgcagtttgcgatgccggagtctgatgcggttgcgatgctgaaacaattatcctgagaataaatgccttggcctttatatggaaatgtggaactgagtggatatgctgtttttgtctgttaaacagagaagctggctgttatccactgagaagcgaacgaaacagtcgggaaaatctcccattatcgtagagatccgcattattaatctcaggagcctgtgtagcgtttataggaagtagtgttctgtcatgatgcctgcaagcggtaacgaaaacgatttgaatatgccttcaggaacaatagaaatcttcgtgcggtgttacgttgaagtggagcggattatgtcagcaatggacagaacaacctaatgaacacagaaccatgatgtggtctgtccttttacagccagtagtgctcgccgcagtcgagcgacagggcgaagccctcggctggttgccctcgccgctgggctggcggccgtctatggccctgcaaacgcgccagaaacgccgtcgaagccgtgtgcgagacaccgcggccggccgccggcgttgtggatacctcgcggaaaacttggccctcactgacagatgaggggcggacgttgacacttgaggggccgactcacccggcgcggcgttgacagatgaggggcaggctcgatttcggccggcgacgtggagctggccagcctcgcaaatcggcgaaaacgcctgattttacgcgagtttcccacagatgatgtggacaagcctggggataagtgccctgcggtattgacacttgaggggcgcgactactgacagatgaggggcgcgatccttgacacttgaggggcagagtgctgacagatgaggggcgcacctattgacatttgaggggctgtccacaggcagaaaatccagcatttgcaagggtttccgcccgtttttcggccaccgctaacctgtcttttaacctgcttttaaaccaatatttataaaccttgtttttaaccagggctgcgccctgtgcgcgtgaccgcgcacgccgaaggggggtgcccccccttctcgaaccctcccggtcgagtgagcgaggaagcaccagggaacagcacttatatattctgcttacacacgatgcctgaaaaaacttcccttggggttatccacttatccacggggatatttttataattattttttttatagtttttagatcttcttttttagagcgccttgtaggcctttatccatgctggttctagagaaggtgttgtgacaaattgccctttcagtgtgacaaatcaccctcaaatgacagtcctgtctgtgacaaattgcccttaaccctgtgacaaattgccctcagaagaagctgttttttcacaaagttatccctgcttattgactcttttttatttagtgtgacaatctaaaaacttgtcacacttcacatggatctgtcatggcggaaacagcggttatcaatcacaagaaacgtaaaaatagcccgcgaatcgtccagtcaaacgacctcactgaggcggcatatagtctctcccgggatcaaaaacgtatgctgtatctgttcgttgaccagatcagaaaatctgatggcaccctacaggaacatgacggtatctgcgagatccatgttgctaaatatgctgaaatattcggattgacctctgcggaagccagtaaggatatacggcaggcattgaagagtttcgcggggaaggaagtggttttttatcgccctgaagaggatgccggcgatgaaaaaggctatgaatcttttccttggtttatcaaacgtgcgcacagtccatccagagggctttacagtgtacatatcaacccatatctcattcccttctttatcgggttacagaaccggtttacgcagtttcggcttagtgaaacaaaagaaatcaccaatccgtatgccatgcgtttatacgaatccctgtgtcagtatcgtaagccggatggctcaggcatcgtctctctgaaaatcgactggatcatagagcgttaccagctgcctcaaagttaccagcgtatgcctgacttccgccgccgcttcctgcaggtctgtgttaatgagatcaacagcagaactccaatgcgcctctcatacattgagaaaaagaaaggccgccagacgactcatatcgtattttccttccgcgatatcacttccatgacgacaggatagtctgagggttatctgtcacagatttgagggtggttcgtcacatttgttctgacctactgagggtaatttgtcacagttttgctgtttccttcagcctgcatggattttctcatactttttgaactgtaatttttaaggaagccaaatttgagggcagtttgtcacagttgatttccttctctttcccttcgtcatgtgacctgatatcgggggttagttcgtcatcattgatgagggttgattatcacagtttattactctgaattggctatccgcgtgtgtacctctacctggagtttttcccacggtggatatttcttcttgcgctgagcgtaagagctatctgacagaacagttcttctttgcttcctcgccagttcgctcgctatgctcggttacacggctgcggcg

SEQ ID NO: 5 - DNA, 35283 bp, Artificial Sequence
  Clone pCCI-4K-SARS-CoV-2-DDWDD. Based on SARS-CoV-2.
gatgtgctgcaaggcgattaagttgggtaacgccagggttttcccagtcacgacgttgtaaaacgacggccagtgaattgtaatacgactcactatagggcgaattctagttattaatagtaatcaattacggggtcattagttcatagcccatatatggagttccgcgttacataacttacggtaaatggcccgcctggctgaccgcccaacgacccccgcccattgacgtcaataatgacgtatgttcccatagtaacgccaatagggactttccattgacgtcaatgggtggagtatttacggtaaactgcccacttggcagtacatcaagtgtatcatatgccaagtacgccccctattgacgtcaatgacggtaaatggcccgcctggcattatgcccagtacatgaccttatgggactttcctacttggcagtacatctacgtattagtcatcgctattaccatggtgatgcggttttggcagtacatcaatgggcgtggatagcggtttgactcacggggatttccaagtctccaccccattgacgtcaatgggagtttgttttggcaccaaaatcaacgggactttccaaaatgtcgtaacaactccgccccattgacgcaaatgggcggtaggcgtgtacggtgggaggtctatataagcagagctggtttagtgaaccgtattaaaggtttataccttcccaggtaacaaaccaaccaactttcgatctcttgtagatctgttctctaaacgaactttaaaatctgtgtggctgtcactcggctgcatgcttagtgcactcacgcagtataattaataactaattactgtcgttgacaggacacgagtaactcgtctatcttctgcaggctgcttacggtttcgtccgtgttgcagccgatcatcagcacatctaggtttcgtccgggtgtgaccgaaaggtaagatggagagccttgtccctggtttcaacgagaaaacacacgtccaactcagtttgcctgttttacaggttcgcgacgtgctcgtacgtggctttggagactccgtggaggaggtcttatcagaggcacgtcaacatcttaaagatggcacttgtggcttagtagaagttgaaaaaggcgttttgcctcaacttgaacagccctatgtgttcatcaaacgttcggatgctcgaactgcacctcatggtcatgttatggttgagctggtagcagaactcgaaggcattcagtacggtcgtagtggtgagacacttggtgtccttgtccctcatgtgggcgaaataccagtggcttaccgcaaggttcttcttcgtaagaacggtaataaaggagctggtggccatagttacggcgccgatctaaagtcatttgacttaggcgacgagcttggcactgatccttatgaagattttcaagaaaactggaacactaaacatagcagtggtgttacccgtgaactcatgcgtgagcttaacggaggggcatacactcgctatgtcgataacaacttctgtggccctgatggctaccctcttgagtgcattaaagaccttctagcacgtgctggtaaagcttcatgcactttgtccgaacaactggactttattgacactaagaggggtgtatactgctgccgtgaacatgagcatgaaattgcttggtacacggaacgttctgaaaagagctatgaattgcagacaccttttgaaattaaattggcaaagaaatttgacaccttcaatggggaatgtccaaattttgtatttcccttaaattccataatcaagactattcaaccaagggttgaaaagaaaaagcttgatggctttatgggtagaattcgatctgtctatccagttgcgtcaccaaatgaatgcaaccaaatgtgcctttcaactctcatgaagtgtgatcattgtggtgaaacttcatggcagacgggcgattttgttaaagccacttgcgaattttgtggcactgagaatttgactaaagaaggtgccactacttgtggttacttaccccaaaatgctgttgttaaaatttattgtccagcatgtcacaattcagaagtaggacctgagcatagtcttgccgaataccataatgaatctggcttgaaaaccattcttcgtaagggtggtcgcactattgcctttggaggctgtgtgttctcttatgttggttgccataacaagtgtgcctattgggtcccgcgtgcgagtgcgaacataggttgtaatcatacgggtgtagtaggtgaaggttcggaaggtctaaatgataatctactagaaatactacaaaaagaaaaagtaaatataaatatagtaggtgattttaaactaaatgaagaaatagcgataatattagcgtcgttttcggcgtcgacgagtgcgtttgtagaaacggtaaaaggtttagattataaagcgtttaaacaaatagtagaatcgtgtggtaattttaaagtgacgaaaggtaaagcgaaaaaaggtgcgtggaatataggtgaacaaaaatcgatactaagtccgctatatgcgtttgcgtcggaagcggcgcgtgtagtacgttcgatattttcgcgtacgctagaaacggcgcaaaattcggtacgtgtattacaaaaagcggcgataacgatactagatggtatatcgcaatattcgctacgtctaatagatgcgatgatgtttacgtcggatttagcgacgaataatctagtagtaatggcgtatataacgggtggtgtagtacaattaacgtcgcaatggctaacgaatatatttggtacggtatatgaaaaactaaaaccggtactagattggctagaagaaaaatttaaagaaggtgtagaatttctacgtgatggttgggaaatagtaaaatttatatcgacgtgtgcgtgtgaaatagtaggtggtcaaatagtaacgtgtgcgaaagaaataaaagaatcggtacaaacgttttttaaactagtaaataaatttctagcgctatgtgcggattcgataataataggtggtgcgaaactaaaagcgctaaatctaggtgaaacgtttgtgacgcattcgaaaggtttatatcgtaaatgtgtaaaatcgcgtgaagaaacgggtctactaatgccgctaaaagcgccgaaagaaataatatttttagaaggtgaaacgctaccgacggaagtattaacggaagaagtagtattaaaaacgggtgatttacaaccgttagaacaaccgacgtcggaagcggtagaagcgccgttagtaggtacgccggtatgtataaatggtctaatgttactagaaataaaagatacggaaaaatattgtgcgctagcgccgaatatgatggtaacgaataatacgtttacgctaaaaggtggtgcgccgacgaaagtaacgtttggtgatgatacggtaatagaagtacaaggttataaatcggtaaatataacgtttgaactagatgaacgtatagataaagtactaaatgaaaaatgttcggcgtatacggtagaactaggtacggaagtaaatgaatttgcgtgtgtagtagcggatgcggtaataaaaacgttacaaccggtatcggaattactaacgccgctaggtatagatttagatgaatggtcgatggcgacgtattatttatttgatgaatcgggtgaatttaaattagcgtcgcatatgtattgttcgttttatccgccggatgaagatgaagaagaaggtgattgtgaagaagaagaatttgaaccgtcgacgcaatatgaatatggtacggaagatgattatcaaggtaaaccgttagaatttggtgcgacgtcggcggcgctacaaccggaagaagaacaagaagaagattggttggatgatgattcgcaacaaacggtaggtcaacaagatggttcggaagataatcaaacgacgacgatacaaacgatagtagaagtacaaccgcaattagaaatggaactaacgccggtagtacaaacgatagaagtaaattcgttttcgggttatttaaaactaacggataatgtatatataaaaaatgcggatatagtagaagaagcgaaaaaagtaaaaccgacggtagtagtaaatgcggcgaatgtatatctaaaacatggtggtggtgtagcgggtgcgttaaataaagcgacgaataatgcgatgcaagtagaatcggatgattatatagcgacgaatggtccgctaaaagtaggtggttcgtgtgtattatcgggtcataatctagcgaaacattgtctacatgtagtaggtccgaatgtaaataaaggtgaagatatacaactactaaaatcggcgtatgaaaattttaatcaacatgaagtactactagcgccgttattatcggcgggtatatttggtgcggacccgatacattcgttacgtgtgtgtgtagatacggtacgcacgaatgtatatttagcggtatttgataaaaatctatatgataaactagtatcgtcgtttttagaaatgaaatcggaaaaacaagtagaacaaaaaatagcggaaataccgaaagaagaagtaaaaccgtttataacggaatcgaaaccgtcggtagaacaacgtaaacaagatgataaaaaaataaaagcgtgtgtagaagaagtaacgacgacgctagaagaaacgaaatttctaacagaaaatttattactatatatagatataaatggtaatctacatccggattcggcgacgctagtatcggatatagatataacgtttttaaaaaaagatgcgccgtatatagtaggtgatgtagtacaagaaggtgtattaacggcggtagtaataccgacgaaaaaagcgggtggtacgacggaaatgctggcgaaagcgttacgtaaagtaccgacggataattatataacgacgtacccgggtcaaggtttaaatggttatacggtagaagaagcgaaaacggtactaaaaaaatgtaaatcggcgttttatatactaccgtcgataatatcgaatgaaaaacaagaaatactaggtacggtatcgtggaatttacgtgaaatgctagcgcatgcggaagaaacacgtaaattaatgccggtatgtgtagaaacgaaagcgatagtatcgacgatacaacgtaaatataaaggtataaaaatacaagaaggtgtagtagattatggtgcgcgtttttatttttatacgtcgaaaacgacggtagcgtcgctaataaatacgctaaatgatctaaatgaaacgctagtaacgatgccgctaggttatgtaacgcatggtttaaatttagaagaagcggcgcgttatatgcgttcgctaaaagtaccggcgacggtatcggtatcgtcgccggatgcggtaacggcgtataatggttatctaacgtcgtcgtcgaaaacgccggaagaacattttatagaaacgatatcgctagcgggttcgtataaagattggtcgtattcgggtcaatcgacgcaactaggtatagaatttctaaaacgtggtgataaatcggtatattatacgtcgaatccgacgacgtttcatctagatggtgaagtaataacgtttgataatctaaaaacgctactatcgttacgtgaagtacgtacgataaaagtatttacgacggtagataatataaatctacatacgcaagtagtagatatgtcgatgacatatggacaacaatttggtccgacgtatttagatggtgcggatgttacgaaaataaaaccgcataattcgcatgaaggtaaaacgttttatgtattaccgaatgatgatacgctacgtgtagaagcgtttgaatattatcatacgactgatccgtcgtttctaggtcgttatatgtcggcgttaaatcatacgaaaaaatggaaatatccgcaagtaaatggtttaacgtcgataaaatgggcggataataattgttatctagcgacggcgttattaacgctacaacaaatagaattaaaatttaatccgccggcgctacaagatgcgtattatcgtgcgcgtgcgggtgaagcggcgaatttttgtgcgctaatattagcgtattgtaataaaacggtaggtgaattaggtgatgtacgtgaaacgatgtcgtatttatttcaacatgcgaatttagattcgtgtaaacgtgtattaaatgtagtatgtaaaacgtgtggtcaacaacaaacgacgctaaaaggtgtagaagcggtaatgtatatgggtacgctatcgtatgaacaatttaaaaaaggtgtacaaataccgtgtacgtgtggtaaacaagcgacgaaatatctagtacaacaagaatcgccgtttgtaatgatgtcggcgccgccggcgcaatatgaactaaaacatggtacgtttacgtgtgcgtcggaatatacgggtaattatcaatgtggtcattataaacatataacgtcgaaagaaacgttatattgtatagatggtgcgttacttacgaaatcgtcggaatataaaggtccgataacggatgtattttataaagaaaattcgtatacgacgacgataaaaccggtaacgtataaattagatggtgtagtatgtacggaaatagatccgaaattagataattattataaaaaagataattcgtattttacggaacaaccgatagatctagtaccgaatcaaccatatccgaatgcgtcgtttgataattttaaatttgtatgtgataatataaaatttgcggatgatttaaatcaattaacgggttataaaaaaccggcgtcgcgtgaactaaaagtaacgttttttccggatttaaatggtgatgtagtagcgatagattataaacattatacgccgtcgtttaaaaaaggtgcgaaattattacataaaccgatagtatggcatgtaaataatgcgacgaataaagcgacgtataaaccgaatacgtggtgtatacggtgtctatggagcacgaaaccggtagaaacgtcgaattcgtttgatgtactaaaatcggaagatgcgcaaggtatggataatctagcgtgtgaagatctaaaaccggtatcggaagaagtagtagaaaatccgacgatacaaaaagatgtactggaatgtaatgtaaaaacgacggaagtagtaggtgatataatactaaaaccggctaataattcgttaaaaataacggaagaagtaggtcatacggatctaatggcggcgtatgtagataattcgtcgctaacgataaaaaaaccgaatgaattatcgcgtgtattaggtttaaaaacgctagcgacgcatggtttagctgctgtaaattcggtaccgtgggatacgatagcgaattatgcgaaaccgtttctaaataaagtagtatcgacgacgacgaatatagtaacgcgatgtttaaatcgtgtatgtacgaattatatgccgtatttttttacgttattactacaattatgtacgtttacgcgatcgacgaattcgcgtataaaagcgtcgatgccgacgacgatagcgaaaaatacggtaaaatcggtaggtaaattttgtctagaagcgtcgtttaattatttaaaatcgccgaatttttctaaactaataaatataataatatggtttttactattatcggtatgcctaggttctttaatctactcaaccgctgctttaggtgttttaatgtctaatttaggcatgccttcttactgtactggttacagagaaggctatttgaactctactaatgtcactattgcaacctactgtactggttctataccttgtagtgtttgtcttagtggtttagattctttagacacctatccttctttagaaactatacaaattaccatttcatcttttaaatgggatttaactgcttttggcttagttgcagagtggtttttggcatatattcttttcactaggtttttctatgtacttggattggctgcaatcatgcaattgtttttcagctattttgcagtacattttattagtaattcttggcttatgtggttaataattaatcttgtacaaatggccccgatttcagctatggttagaatgtacatcttctttgcatcattttattatgtatggaaaagttatgtgcatgttgtagacggttgtaattcatcaacttgtatgatgtgttacaaacgtaatagagcaacaagagtcgaatgtacaactattgttaatggtgttagaaggtccttttatgtctatgctaatggaggtaaaggcttttgcaaactacacaattggaattgtgttaattgtgatacattctgtgctggtagtacatttattagtgatgaagttgcgagagacttgtcactacagtttaaaagaccaataaatcctactgaccagtcttcttacatcgttgatagtgttacagtgaagaatggttccatccatctttactttgataaagctggtcaaaagacttatgaaagacattctctctctcattttgttaacttagacaacctgagagctaataacactaaaggttcattgcctattaatgttatagtttttgatggtaaatcaaaatgtgaagaatcatctgcaaaatcagcgtctgtttactacagtcagcttatgtgtcaacctatactgttactagatcaggcattagtgtctgatgttggtgatagtgcggaagttgcagttaaaatgtttgatgcttacgttaatacgttttcatcaacttttaacgtaccaatggaaaaactcaaaacactagttgcaactgcagaagctgaacttgcaaagaatgtgtccttagacaatgtcttatctacttttatttcagcagctcggcaagggtttgttgattcagatgtagaaactaaagatgttgttgaatgtcttaaattgtcacatcaatctgacatagaagttactggcgatagttgtaataactatatgctcacctataacaaagttgaaaacatgacaccccgtgaccttggtgcttgtattgactgtagtgcgcgtcatattaatgcgcaggtagcaaaaagtcacaacattgctttgatatggaacgttaaagatttcatgtcattgtctgaacaactacgaaaacaaatacgtagtgctgctaaaaagaataacttaccttttaagttgacatgtgcaactactagacaagttgttaatgttgtaacaacaaagatagcacttaagggtggtaaaattgttaataattggttgaagcagttaattaaagtaacgctagtatttctatttgtagcggcgatattttatttaataacgccggtacatgtaatgtcgaaacatacggatttttcgtcggaaataataggttataaagcgatagatggtggtgtaactcgtgatatagcgtcgacggatacgtgttttgcgaataaacatgcggattttgatacgtggttttcgcaacgtggtggttcgtatacgaatgataaagcgtgtccgttaatagcggcggtaataacacgtgaagtaggttttgtagtaccgggtttaccgggtacgatattacgtacgacgaatggtgattttttacattttttaccgcgtgtattttcggcggtaggtaatatatgttatacgccgtcgaaactaatagaatatacggattttgcgacgtcggcgtgtgtattagcggcggaatgtacgatatttaaagatgcgtcgggtaaaccggtaccgtattgttatgatacgaatgtactagaaggttcggtagcgtatgaatcgttacgcccggatacacgttatgtactaatggatggttcgataatacaatttccgaatacgtatctagaaggttcggtacgtgtagtaacgacgtttgattcggaatattgtcgtcatggtacgtgtgaacgttcggaagcgggtgtatgtgtatcgacgtcggggcgttgggtactaaataatgattattatcgttcgttaccgggtgtattctgtggtgtagatgcggtaaatttactaacgaatatgtttacgccgctgatacaaccgataggtgcgttagatatatcggcgtcgatagtagcgggtggtatagtagcgatagtagtaacgtgtctagcgtattattttatgcgttttcgtcgtgcgtttggtgaatattcgcatgtagtagcgtttaatacgttactatttctaatgtcttttacagtactatgtttaacgccggtatattcttttttaccgggtgtatattcggtaatatatttatatttaacgttttatctaacgaatgatgtatcgtttttagcgcatatacaatggatggtaatgtttacgccgttagtaccgttttggataacaatagcgtatataatatgtatatcgacgaaacatttttattggtttttttcgaattatctgaaacgtcgtgtagtatttaatggtgtatctttttcgacgtttgaagaagcggcgctatgtacatttttattaaataaagaaatgtatctaaaattacgttcggatgtactattaccgctaacgcaatataatcgttatttagcgctatataataaatataaatatttttcgggtgcgatggatacgacgtcgtatcgtgaagcggcgtgttgtcatctagcgaaagcgctaaatgatttttcgaattcgggttcggatgtactatatcaaccgccgcaaacgtcgataacgtcggcggtattacaatcgggttttcgtaaaatggcgtttccgtcgggtaaagtagaaggttgtatggtacaagtaacgtgtggtacgacgacgctaaatggtctatggctagatgatgtagtatattgtccgcgtcatgtaatatgtacgtcggaagatatgctaaatccgaattatgaagatttactaatacgtaaatcgaatcataattttttagtacaagcgggtaatgtacaactacgtgtaataggtcattcgatgcaaaattgtgtactaaaactaaaagtagatacggcgaatccgaaaacaccgaaatataaatttgtacgtatacaaccgggtcaaacgttttcggtattagcgtgttataatggttctccgtcgggtgtatatcaatgtgcgatgcgtccgaattttacgattaaaggttcgtttctaaatggttcgtgtggttcggtaggttttaatatagattatgattgtgtatcgttttgttatatgcatcatatggaattaccgacgggtgtacatgcgggtacggatttagaaggtaatttttatggtccgtttgtagatcgtcaaacagcgcaagcggcgggtacggatacgacgattacggtaaatgtattagcgtggttatatgcggcggtaataaatggtgatcgttggtttctaaatcgttttacgacgacgctaaatgattttaatctagtagcgatgaaatataattatgaaccgctgacacaagatcatgtagatatactaggtccgctatcggcgcaaacgggtatagcggtattagatatgtgtgcgtcgttaaaagaattactacaaaatggtatgaatggtcgtacgatattaggttcggcgttattagaagatgaatttacgccgtttgatgtagtacgtcaatgttcgggtgtaacgtttcaatcggcggtaaaacgtacgataaaaggtacgcatcattggttattactaacgatattaacgtcgctattagtattagtacaatcgacgcaatggtcgttatttttttttttatatgaaaatgcgtttttaccgtttgcgatgggtataatagcgatgtcggcgtttgcgatgatgtttgtaaaacataagcatgcgtttctatgtttatttttattaccgtcgctagcgacggtagcgtattttaatatggtatatatgccggcgtcgtgggtaatgcgtataatgacgtggttagatatggtagatacgtcgttatcgggttttaaactaaaagattgtgtaatgtatgcgtcggcggtagtattactaatactaatgacggcgcgtacggtatatgatgatggtgcgcgtcgtgtatggacgctaatgaatgtattaacgctagtatataaagtatattatgggaatgcgttagatcaagcgatatcgatgtgggcgctaataatatcggtaacgtcgaattattcgggtgtagtaacgacggtaatgtttttagcgcgtggtatagtatttatgtgtgtagaatattgtccgatattttttataacgggtaatacactacaatgtataatgctagtatattgttttttaggttatttttgtacgtgttattttggtctattttgtttactaaatcgttattttcgtctaacactaggtgtatatgattatttagtatcgacgcaagaatttcgttatatgaattcgcaaggtctactaccgccgaaaaattcgatagatgcgtttaaactaaatataaaattattaggtgtaggtggtaaaccgtgtataaaagtagcgacggtacaatcgaaaatgtcggatgtaaaatgtacatcggtagtattactatcggtattacaacaactacgtgtagaatcgtcgtcgaaattatgggcgcaatgtgtacaattacataatgatatactattagcgaaagatacgacggaagcgtttgaaaaaatggtatcgctactatcggtattactatcgatgcaaggtgcggtagatataaataaactatgtgaagaaatgctagataatcgtgcgacgttacaagcgatagcgtcggaattttcgtcgctaccgtcgtatgcggcgtttgcgacggcgcaagaagcgtatgaacaagcggtagcgaatggtgattcggaagtagtactaaaaaaattaaaaaaatcgttaaatgtagcgaaatcggaatttgatcgtgatgcggcgatgcaacgtaaattagaaaaaatggcggatcaagcgatgacgcaaatgtataaacaagcgcgttcggaagataaacgtgcgaaagtaacgtcggcgatgcaaacgatgctatttacgatgctacgtaaattagataatgatgcgctaaataatataataaataatgcgcgtgatggttgtgtaccgttaaatataataccgctaacgacggcggcgaaactaatggtagtaataccggattataatacatataaaaatacgtgtgatggtacgacgtttacgtatgcgtcggcgttatgggaaatacaacaagtagtagatgcggattcgaaaatagtacaactatcggaaatatcgatggataattcgccgaatttagcgtggccgctaatagtaacggcgttacgtgcgaattcggcggtaaaattacaaaataatgaactatcgccggtagcgctacgacagatgtcttgtgctgccggtactacacaaactgcttgcactgatgacaatgcgttagcttactacaacacaacaaagggaggtaggtttgtacttgcactgttatccgatttacaggatttgaaatgggctagattccctaagagtgatggaactggtactatctatacagaactggaaccaccttgtaggtttgttacagacacacctaaaggtcctaaagtgaagtatttatactttattaaaggattaaacaacctaaatagaggtatggtacttggtagtttagctgccacagtacgtctacaagctggtaatgcaacagaagtgcctgccaattcaactgtattatctttctgtgcttttgctgtagatgctgctaaagcttacaaagattatctagctagtgggggacaaccaatcactaattgtgttaagatgttgtgtacacacactggtactggtcaggcaataacagttacaccggaagccaatatggatcaagaatcctttggtggtgcatcgtgttgtctgtactgccgttgccacatagatcatccaaatcctaaaggattttgtgacttaaaaggtaagtatgtacaaatacctacaacttgtgctaatgaccctgtgggttttacacttaaaaacacagtctgtaccgtctgcggtatgtggaaaggttatggctgtagttgtgatcaactccgcgaacccatgcttcagtcagctgatgcacaatcgtttttaaacgggtttgcggtgtaagtgcagcccgtcttacaccgtgcggcacaggcactagtactgatgtcgtatacagggcttttgacatctacaatgataaagtagctggttttgctaaattcctaaaaactaattgttgtcgcttccaagaaaaggacgaagatgacaatttaattgattcttactttgtagttaagagacacactttctctaactaccaacatgaagaaacaatttataatttacttaaggattgtccagctgttgctaaacatgacttctttaagtttagaatagacggtgacatggtaccacatatatcacgtcaacgtcttactaaatacacaatggcagacctcgtctatgctttaaggcattttgatgaaggtaattgtgacacattaaaagaaatacttgtcacatacaattgttgtgatgatgattatttcaataaaaaggactggtatgattttgtagaaaacccagatatattacgcgtatacgccaacttaggtgaacgtgtacgccaagctttgttaaaaacagtacaattctgtgatgccatgcgaaatgctggtattgttggtgtactgacattagataatcaagatctcaatggtaactggtatgatttcggtgatttcatacaaaccacgccaggtagtggagttcctgttgtagattcttattattcattgttaatgcctatattaaccttgaccagggctttaactgcagagtcacatgttgacactgacttaacaaagccttacattaagtgggatttgttaaaatatgacttcacggaagagaggttaaaactctttgaccgttattttaaatattgggatcagacataccacccaaattgtgttaactgtttggatgacagatgcattctgcattgtgcaaactttaatgttttattctctacagtgttcccacctacaagttttggaccactagtgagaaaaatatttgttgatggtgttccatttgtagtttcaactggataccacttcagagagctaggtgttgtacataatcaggatgtaaacttacatagctctagacttagttttaaggaattacttgtgtatgctgctgaccctgctatgcacgctgcttctggtaatctattactagataaacgcactacgtgcttttcagtagctgcacttactaacaatgttgcttttcaaactgtcaaacccggtaattttaacaaagacttctatgactttgctgtgtctaagggtttctttaaggaaggaagttctgttgaattaaaacacttcttctttgctcaggatggtaatgctgctatcagcgattatgactactatcgttataatctaccaacaatgtgtgatatcagacaactactatttgtagttgaagttgttgataagtactttgattgttacgatggtggctgtattaatgctaaccaagtcatcgtcaacaacctagacaaatcagctggttttccatttaataaatggggtaaggctagactttattatgattcaatgagttatgaggatcaagatgcacttttcgcatatacaaaacgtaatgtcatccctactataactcaaatgaatcttaagtatgccattagtgcaaagaatagagctcgcaccgtagctggtgtctctatctgtagtactatgaccaatagacagtttcatcaaaaattattgaaatcaatagccgccactagaggagctactgtagtaattggaacaagcaaattctatggtggttggcacaacatgttaaaaactgtttatagtgatgtagaaaaccctcaccttatgggttgggattatcctaaatgtgatagagccatgcctaacatgcttagaattatggcctcacttgttcttgctcgcaaacatacaacgtgttgtagcttgtcacaccgtttctatagattagctaatgagtgtgctcaagtattgagtgaaatggtcatgtgtggcggttcactatatgttaaaccaggtggaacctcatcaggagatgccacaactgcttatgctaatagtgtttttaacatttgtcaagctgtcacggccaatgttaatgcacttttatctactgatggtaacaaaattgccgataagtatgtccgcaatttacaacacagactttatgagtgtctctatagaaatagagatgttgacacagactttgtgaatgagttttacgcatatttgcgtaaacatttctcaatgatgatactctctgacgatgctgttgtgtgtttcaatagcacttatgcatctcaaggtctagtggctagcataaagaactttaagtcagttctttattatcaaaacaatgtttttatgtctgaagcaaaatgttggactgagactgaccttactaaaggacctcatgaattttgctctcaacatacaatgctagttaaacagggtgatgattatgtgtaccttccttacccagatccatcaagaatcctaggggccggctgttttgtagatgatatcgtaaaaacagatggtacacttatgattgaacggttcgtgtctttagctatagatgcttacccacttactaaacatcctaatcaggagtatgctgatgtctttcatttgtacttacaatacataagaaagctacatgatgagttaacaggacacatgttagacatgtattctgttatgcttactaatgataacacttcaaggtattgggaacctgagttttatgaggctatgtacacaccgcatacagtcttacaggctgttggggcttgtgttctttgcaattcacagacttcattaagatgtggtgcttgcatacgtagaccattcttatgttgtaaatgctgttacgaccatgtcatatcaacatcacataaattagtcttgtctgttaatccgtatgtttgcaatgctccaggttgtgatgtcacagatgtgactcaactttacttaggaggtatgagctattattgtaaatcacataaaccacccattagttttccattgtgtgctaatggacaagtttttggtttatataaaaatacatgtgttggtagcgataatgttactgactttaatgcaattgcaacatgtgactggacaaatgctggtgattacattttagctaacacctgtactgaaagactcaagctttttgcagcagaaacgctcaaagctactgaggagacatttaaactgtcttatggtattgctactgtacgtgaagtgctgtctgacagagaattacatctttcatgggaagttggtaaacctagaccaccacttaaccgaaattatgtctttactggttatcgtgtaactaaaaacagtaaagtacaaataggagagtacacctttgaaaaaggtgactatggtgatgctgttgtttaccgaggtacaacaacttacaaattaaatgttggtgattattttgtgctgacatcacatacagtaatgccattaagtgcacctacactagtgccacaagagcactatgttagaattactggcttatacccaacactcaatatctcagatgagttttctagcaatgttgcaaattatcaaaaggttggtatgcaaaagtattctacactccagggaccacctggtactggtaagagtcattttgctattggcctagctctctactacccttctgctcgcatagtgtatacagcttgctctcatgccgctgttgatgcactatgtgagaaggcattaaaatatttgcctatagataaatgtagtagaattatacctgcacgtgctcgtgtagagtgttttgataaattcaaagtgaattcaacattagaacagtatgtcttttgtactgtaaatgcattgcctgagacgacagcagatatagttgtctttgatgaaatttcaatggccacaaattatgatttgagtgttgtcaatgccagattacgtgctaagcactatgtgtacattggcgaccctgctcaattacctgcaccacgcacattgctaactaagggcacactagaaccagaatatttcaattcagtgtgtagacttatgaaaactataggtccagacatgttcctcggaacttgtcggcgttgtcctgctgaaattgttgacactgtgagtgctttggtttatgataataagcttaaagcacataaagacaaatcagctcaatgctttaaaatgttttataagggtgttatcacgcatgatgtttcatctgcaattaacaggccacaaataggcgtggtaagagaattccttacacgtaaccctgcttggagaaaagctgtctttatttcaccttataattcacagaatgctgtagcctcaaagattttgggactaccaactcaaactgttgattcatcacagggctcagaatatgactatgtcatattcactcaaaccactgaaacagctcactcttgtaatgtaaacagatttaatgttgctattaccagagcaaaagtaggcatactttgcataatgtctgatagagacctttatgacaagttgcaatttacaagtcttgaaattccacgtaggaatgtggcaactttacaagctgaaaatgtaacaggactctttaaagattgtagtaaggtaatcactgggttacatcctacacaggcacctacacacctcagtgttgacactaaattcaaaactgaaggtttatgtgttgacatacctggcatacctaaggacatgacctatagaagactcatctctatgatgggttttaaaatgaattatcaagttaatggttaccctaacatgtttatcacccgcgaagaagctataagacatgtacgtgcatggattggcttcgatgtcgaggggtgtcatgctactagagaagctgttggtaccaatttacctttacagctaggtttttctacaggtgttaacctagttgctgtacctacaggttatgttgatacacctaataatacagatttttccagagttagtgctaaaccaccgcctggagatcaatttaaacacctcataccacttatgtacaaaggacttccttggaatgtagtgcgtataaagattgtacaaatgttaagtgacacacttaaaaatctctctgacagagtcgtatttgtcttatgggcacatggctttgagttgacatctatgaagtattttgtgaaaataggacctgagcgcacctgttgtctatgtgatagacgtgccacatgcttttccactgcttcagacacttatgcctgttggcatcattctattggatttgattacgtctataatccgtttatgattgatgttcaacaatggggttttacaggtaacctacaaagcaaccatgatctgtattgtcaagtccatggtaatgcacatgtagctagttgtgatgcaatcatgactaggtgtctagctgtccacgagtgctttgttaagcgtgttgactggactattgaatatcctataattggtgatgaactgaagattaatgcggcttgtagaaaggttcaacacatggttgttaaagctgcattattagcagacaaattcccagttcttcacgacattggtaaccctaaagctattaagtgtgtacctcaagctgatgtagaatggaagttctatgatgcacagccttgtagtgacaaagcttataaaatagaagaattattctattcttatgccacacattctgacaaattcacagatggtgtatgcctattttggaattgcaatgtcgatagatatcctgctaattccattgtttgtagatttgacactagagtgctatctaaccttaacttgcctggttgtgatggtggcagtttgtatgtaaataaacatgcattccacacaccagcttttgataaaagtgcttttgttaatttaaaacaattaccatttttctattactctgacagtccatgtgagtctcatggaaaacaagtagtgtcagatatagattatgtaccactaaagtctgctacgtgtataacacgttgcaatttaggtggtgctgtctgtagacatcatgctaatgagtacagattgtatctcgatgcttataacatgatgatctcagctggctttagcttgtgggtttacaaacaatttgatacttataacctctggaacacttttacaagacttcagagtttagaaaatgtggcttttaatgttgtaaataagggacactttgatggacaacagggtgaagtaccagtttctatcattaataacactgtttacacaaaagttgatggtgttgatgtagaattgtttgaaaataaaacaacattacctgttaatgtagcatttgagctttgggctaagcgcaacattaaaccagtaccagaggtgaaaatactcaataatttgggtgtggacattgctgctaatactgtgatctgggactacaaaagagatgctccagcacatatatctactattggtgtttgttctatgactgacatagccaagaaaccaactgaaacgatttgtgcaccactcactgtcttttttgatggtagagttgatggtcaagtagacttatttagaaatgcccgtaatggtgttcttattacagaaggtagtgttaaaggtttacaaccatctgtaggtcccaaacaagctagtcttaatggagtcacattaattggagaagccgtaaaaacacagttcaattattataagaaagttgatggtgttgtccaacaattacctgaaacttactttactcagagtagaaatttacaagaatttaaacccaggagtcaaatggaaattgatttcttagaattagctatggatgaattcattgaacggtataaattagaaggctatgccttcgaacatatcgtttatggagattttagtcatagtcagttaggtggtttacatctactgattggactagctaaacgttttaaggaatcaccttttgaattagaagattttattcctatggacagtacagttaaaaactatttcataacagatgcgcaaacaggttcatctaagtgtgtgtgttctgttattgatttattacttgatgattttgttgaaataataaaatcccaagatttatctgtagtttctaaggttgtcaaagtgactattgactatacagaaatttcatttatgctttggtgtaaagatggccatgtagaaacattttacccaaaattacaatctagtcaagcgtggcaaccgggtgttgctatgcctaatctttacaaaatgcaaagaatgctattagaaaagtgtgaccttcaaaattatggtgatagtgcaacattacctaaaggcataatgatgaatgtcgcaaaatatactcaactgtgtcaatatttaaacacattaacattagctgtaccctataatatgagagttatacattttggtgctggttctgataaaggagttgcaccaggtacagctgttttaagacagtggttgcctacgggtacgctgcttgtcgattcagatcttaatgactttgtctctgatgcagattcaactttgattggtgattgtgcaactgtacatacagctaataaatgggatctcattattagtgatatgtacgaccctaagactaaaaatgttacaaaagaaaatgactctaaagagggttttttcacttacatttgtgggtttatacaacaaaagctagctcttggaggttccgtggctataaagataacagaacattcttggaatgctgatctttataagctcatgggacacttcgcatggtggacagcctttgttactaatgtgaatgcgtcatcatctgaagcatttttaattggatgtaattatcttggcaaaccacgcgaacaaatagatggttatgtcatgcatgcaaattacatattttggaggaatacaaatccaattcagttgtcttcctattctttatttgacatgagtaaatttccccttaaattaaggggtactgctgttatgtctttaaaagaaggtcaaatcaatgatatgattttatctcttcttagtaaaggtagacttataattagagaaaacaacagagttgttatttctagtgatgttcttgttaacaactaaacgaacaatgtttgtttttcttgttttattgccactagtctctagtcagtgtgttaatcttacaaccagaactcaattaccccctgcatacactaattctttcacacgtggtgtttattaccctgacaaagttttcagatcctcagttttacattcaactcaggacttgttcttacctttcttttccaatgttacttggttccatgctatacatgtctctgggaccaatggtactaagaggtttgataaccctgtcctaccatttaatgatggtgtttattttgcttccactgagaagtctaacataataagaggctggatttttggtactactttagattcgaagacccagtccctacttattgttaataacgctactaatgttgttattaaagtctgtgaatttcaattttgtaatgatccatttttgggtgtttattaccacaaaaacaacaaaagttggatggaaagtgagttcagagtttattctagtgcgaataattgcacttttgaatatgtctctcagccttttcttatggaccttgaaggaaaacagggtaatttcaaaaatcttagggaatttgtgtttaagaatattgatggttattttaaaatatattctaagcacacgcctattaatttagtgcgtgatctcccccagggtttttcggctttagaaccattggtagatttgccaataggtattaacatcactaggtttcaaactttacttgctttacatagaagttatttgactcctggtgattcttcttcaggttggacagctggtgctgcagcttattatgtgggttatcttcaacctaggacttttctattaaaatataatgaaaatggaaccattacagatgctgtagactgtgcacttgaccctctctcagaaacaaagtgtacgttgaaatccttcactgtagaaaaaggaatctatcaaacttctaactttagagtccaaccaacagaatctattgttagatttcctaatattacaaacttgtgcccttttggtgaagtttttaacgccaccagatttgcatctgtttatgcttggaacaggaagagaatcagcaactgtgttgctgattattctgtcctatataattccgcatcattttccacttttaagtgttatggagtgtctcctactaaattaaatgatctctgctttactaatgtctatgcagattcatttgtaattagaggtgatgaagtcagacaaatcgctccagggcaaactggaaagattgctgattataattataaattaccagatgattttacaggctgcgttatagcttggaattctaacaatcttgattctaaggttggtggtaattataattacctgtatagattgtttaggaagtctaatctcaaaccttttgagagagatatttcaactgaaatctatcaggccggtagcacaccttgtaatggtgttgaaggttttaattgttactttcctttacaatcatatggtttccaacccactaatggtgttggttaccaaccatacagagtagtagtactttcttttgaacttctacatgcaccagcaactgtttgtggacctaaaaagtctactaatttggttaaaaacaaatgtgtcaatttcaacttcaatggtttaacaggcacaggtgttcttactgagtctaacaaaaagtttctgcctttccaacaatttggcagagacattgctgacactactgatgctgtccgtgatccacagacacttgagattcttgacattacaccatgttcttttggtggtgtcagtgttataacaccaggaacaaatacttctaaccaggttgctgttctttatcaggatgttaactgcacagaagtccctgttgctattcatgcagatcaacttactcctacttggcgtgtttattctacaggttctaatgtttttcaaacacgtgcaggctgtttaataggggctgaacatgtcaacaactcatatgagtgtgacatacccattggtgcaggtatatgcgctagttatcagactcagactaattctcctcggcgggcacgtagtgtagctagtcaatccatcattgcctacactatgtcacttggtgcagaaaattcagttgcttactctaataactctattgccatacccacaaattttactattagtgttaccacagaaattctaccagtgtctatgaccaagacatcagtagattgtacaatgtacatttgtggtgattcaactgaatgcagcaatcttttgttgcaatatggcagtttttgtacacaattaaaccgtgctttaactggaatagctgttgaacaagacaaaaacacccaagaagtttttgcacaagtcaaacaaatttacaaaacaccaccaattaaagattttggtggttttaatttttcacaaatattaccagatccatcaaaaccaagcaagaggtcatttattgaagatctacttttcaacaaagtgacacttgcagatgctggcttcatcaaacaatatggtgattgccttggtgatattgctgctagagacctcatttgtgcacaaaagtttaacggccttactgttttgccacctttgctcacagatgaaatgattgctcaatacacttctgcactgttagcgggtacaatcacttctggttggacctttggtgcaggtgctgcattacaaataccatttgctatgcaaatggcttataggtttaatggtattggagttacacagaatgttctctatgagaaccaaaaattgattgccaaccaatttaatagtgctattggcaaaattcaagactcactttcttccacagcaagtgcacttggaaaacttcaagatgtggtcaaccaaaatgcacaagctttaaacacgcttgttaaacaacttagctccaattttggtgcaatttcaagtgttttaaatgatatcctttcacgtcttgacaaagttgaggctgaagtgcaaattgataggttgatcacaggcagacttcaaagtttgcagacatatgtgactcaacaattaattagagctgcagaaatcagagcttctgctaatcttgctgctactaaaatgtcagagtgtgtacttggacaatcaaaaagagttgatttttgtggaaagggctatcatcttatgtccttccctcagtcagcacctcatggtgtagtcttcttgcatgtgacttatgtccctgcacaagaaaagaacttcacaactgctcctgccatttgtcatgatggaaaagcacactttcctcgtgaaggtgtctttgtttcaaatggcacacactggtttgtaacacaaaggaatttttatgaaccacaaatcattactacagacaacacatttgtgtctggtaactgtgatgttgtaataggaattgtcaacaacacagtttatgatcctttgcaacctgaattagactcattcaaggaggagttagataaatattttaagaatcatacatcaccagatgttgatttaggtgacatctctggcattaatgcttcagttgtaaacattcaaaaagaaattgaccgcctcaatgaggttgccaagaatttaaatgaatctctcatcgatctccaagaacttggaaagtatgagcagtatataaaatggccatggtacatttggctaggttttatagctggcttgattgccatagtaatggtgacaattatgctttgctgtatgaccagttgctgtagttgtctcaagggctgttgttcttgtggatcctgctgcaaatttgatgaagacgactctgagccagtgctcaaaggagtcaaattacattacacataaacgaacttatggatttgtttatgagaatcttcacaattggaactgtaactttgaagcaaggtgaaatcaaggatgctactccttcagattttgttcgcgctactgcaacgataccgatacaagcctcactccctttcggatggcttattgttggcgttgcacttcttgctgtttttcagagcgcttccaaaatcataaccctcaaaaagagatggcaactagcactctccaagggtgttcactttgtttgcaacttgctgttgttgtttgtaacagtttactcacaccttttgctcgttgctgctggccttgaagccccttttctctatctttatgctttagtctacttcttgcagagtataaactttgtaagaataataatgaggctttggctttgctggaaatgccgttccaaaaacccattactttatgatgccaactattttctttgctggcatactaattgttacgactattgtataccttacaatagtgtaacttcttcaattgtcattacttcaggtgatggcacaacaagtcctatttctgaacatgactaccagattggtggttatactgaaaaatgggaatctggagtaaaagactgtgttgtattacacagttacttcacttcagactattaccagctgtactcaactcaattgagtacagacactggtgttgaacatgttaccttcttcatctacaataaaattgttgatgagcctgaagaacatgtccaaattcacacaatcgacggttcatccggagttgttaatccagtaatggaaccaatttatgatgaaccgacgacgactactagcgtgcctttgtaagcacaagctgatgagtacgaacttatgtactcattcgtttcggaagagacaggtacgttaatagttaatagcgtacttctttttcttgctttcgtggtattcttgctagttacactagccatccttactgcgcttcgattgtgtgcgtactgctgcaatattgttaacgtgagtcttgtaaaaccttctttttacgtttactctcgtgttaaaaatctgaattcttctagagttcctgatcttctggtctaaacgaactaaatattatattagtttttctgtttggaactttaattttagccatggcagattccaacggtactattaccgttgaagagcttaaaaagctccttgaacaatggaacctagtaataggtttcctattccttacatggatttgtcttctacaatttgcctatgccaacaggaataggtttttgtatataattaagttaattttcctctggctgttatggccagtaactttagcttgttttgtgcttgctgctgtttacagaataaattggatcaccggtggaattgctatcgcaatggcttgtcttgtaggcttgatgtggctcagctacttcattgcttctttcagactgtttgcgcgtacgcgatccatgtggtcattcaatccagaaactaacattcttctcaacgtgccactccatggcactattctgaccagaccgcttctagaaagtgaactcgtaatcggagctgtgatccttcgtggacatcttcgtattgctggacaccatctaggacgctgtgacatcaaggacctgcctaaagaaatcactgttgctacatcacgaacgctttcttattacaaattgggagcttcgcagcgtgtagcaggtgactcaggttttgctgcatacagtcgctacaggattggcaactataaattaaacacagaccattccagtagcagtgacaatattgctttgcttgtacagtaagtgacaacagatgtttcatctcgttgactttcaggttactatagcagagatattactaattattatgaggacttttaaagtttccatttggaatcttgattacatcataaacctcataattaaaaatttatctaagtcactaactgagaataaatattctcaattagatgaagagcaaccaatggagattgattaaacgaacatgaaaattattcttttcttggcactgataacactcgctacttgtgagctttatcactaccaagagtgtgttagaggtacaacagtacttttaaaagaaccttgctcttctggaacatacgagggcaattcaccatttcatcctctagctgataacaaatttgcactgacttgctttagcactcaatttgcttttgcttgtcctgacggcgtaaaacacgtctatcagttacgtgccagatcagtttcacctaaactgttcatcagacaagaggaagttcaagaactttactctccaatttttcttattgttgcggcaatagtgtttataacactttgcttcacactcaaaagaaagacagaatgattgaactttcattaattgacttctatttgtgctttttagcctttctgctattccttgttttaattatgcttattatcttttggttctcacttgaactgcaagatcataatgaaacttgtcacgcctaaacgaacatgaaatttcttgttttcttaggaatcatcacaactgtagctgcatttcaccaagaatgtagtttacagtcatgtactcaacatcaaccatatgtagttgatgacccgtgtcctattcacttctattctaaatggtatattagagtaggagctagaaaatcagcacctttaattgaattgtgcgtggatgaggctggttctaaatcacccattcagtacatcgatatcggtaattatacagtttcctgtttaccttttacaattaattgccaggaacctaaattgggtagtcttgtagtgcgttgttcgttctatgaagactttttagagtatcatgacgttcgtgttgttttagatttcatctaaacgaacaaactaaaatgtctgataatggaccccaaaatcagcgaaatgcaccccgcattacgtttggtggaccctcagattcaactggcagtaaccagaatggagaacgcagtggggcgcgatcaaaacaacgtcggccccaaggtttacccaataatactgcgtcttggttcaccgctctcactcaacatggcaaggaagaccttaaattccctcgaggacaaggcgttccaattaacaccaatagcagtccagatgaccaaattggctactaccgaagagctaccagacgaattcgtggtggtgacggtaaaatgaaagatctcagtccaagatggtatttctactacctaggaactgggccagaagctggacttccctatggtgctaacaaagacggcatcatatgggttgcaactgagggagccttgaatacaccaaaagatcacattggcacccgcaatcctgctaacaatgctgcaatcgtgctacaacttcctcaaggaacaacattgccaaaaggcttctacgcagaagggagcagaggcggcagtcaagcctcttctcgttcctcatcacgtagtcgcaacagttcaagaaattcaactccaggcagcagtaggggaacttctcctgctagaatggctggcaatggcggtgatgctgctcttgctttgctgctgcttgacagattgaaccagcttgagagcaaaatgtctggtaaaggccaacaacaacaaggccaaactgtcactaagaaatctgctgctgaggcttctaagaagcctcggcaaaaacgtactgccactaaagcatacaatgtaacacaagctttcggcagacgtggtccagaacaaacccaaggaaattttggggaccaggaactaatcagacaaggaactgattacaaacattggccgcaaattgcacaatttgcccccagcgcttcagcgttcttcggaatgtcgcgcattggcatggaagtcacaccttcgggaacgtggttgacctacacaggtgccatcaaattggatgacaaagatccaaatttcaaagatcaagtcattttgctgaataagcatattgacgcatacaaaacattcccaccaacagagcctaaaaaggacaaaaagaagaaggctgatgaaactcaagccttaccgcagagacagaagaaacagcaaactgtgactcttcttcctgctgcagatttggatgatttctccaaacaattgcaacaatccatgagcagtgctgactcaactcaggcctaaactcatgcagaccacacaaggcagatgggctatataaacgttttcgcttttccgtttacgatatatagtctactcttgtgcagaatgaattctcgtaactacatagcacaagtagatgtagttaactttaatctcacatagcaatctttaatcagtgtgtaacattagggaggacttgaaagagccaccacattttcaccgaggccacgcggagtacgatcgagtgtacagtgaacaatgctagggagagctgcctatatggaagagccctaatgtgtaaaattaattttagtagtgctatccccatgtgattttaatagcttcttaggagaatgacaaaaaaaaaaaaaaaaaaaaaaaaaaaaaaaaaaaaaaaaaaaaaaaaaaaaaaaaaaagggtcggcatggcatctccacctcctcgcggtccgacctgggcatccgaaggaggacgcacgtccactcggatggctaagggagcagcacactggcggccgttactagggccgcgcccttcccaacagttgcgcagcctgaatggcgaatggagatccaatttttaagtgtataatgtgttaaactactgattctaattgtttgtgtattttagattcacagtcccaaggctcatttcaggcccctcagtcctcacagtctgttcatgatcataatcagccataccacatttgtagaggttttacttgctttaaaaaacctcccacacctccccctgaacctgaaacataaaatgaatgcaattgttgttgttaacttgtttattgcagcttataatggttacaaataaagcaatagcatcacaaatttcacaaataaagcatttttttcactgcattctagttgtggtttgtccaaactcatcaatgtatcttaaagcttgagtattctatagtctcacctaaatagcttggcgtaatcatggtcatagctgtttcctgtgtgaaattgttatccgctcacaattccacacaacatacgagccggaagcataaagtgtaaagcctggggtgcctaatgagtgagctaactcacattaattgcgttgcgctcactgcccgctttccagtcgggaaacctgtcgtgccagctgcattaatgaatcggccaacgcgaaccccttgcggccgcccgggccgtcgaccaattctcatgtttgacagcttatcatcgaatttctgccattcatccgcttattatcacttattcaggcgtagcaaccaggcgtttaagggcaccaataactgccttaaaaaaattacgccccgccctgccactcatcgcagtactgttgtaattcattaagcattctgccgacatggaagccatcacaaacggcatgatgaacctgaatcgccagcggcatcagcaccttgtcgccttgcgtataatatttgcccatggtgaaaacgggggcgaagaagttgtccatattggccacgtttaaatcaaaactggtgaaactcacccagggattggctgagacgaaaaacatattctcaataaaccctttagggaaataggccaggttttcaccgtaacacgccacatcttgcgaatatatgtgtagaaactgccggaaatcgtcgtggtattcactccagagcgatgaaaacgtttcagtttgctcatggaaaacggtgtaacaagggtgaacactatcccatatcaccagctcaccgtctttcattgccatacgaaattccggatgagcattcatcaggcgggcaagaatgtgaataaaggccggataaaacttgtgcttatttttctttacggtctttaaaaaggccgtaatatccagctgaacggtctggttataggtacattgagcaactgactgaaatgcctcaaaatgttctttacgatgccattgggatatatcaacggtggtatatccagtgatttttttctccattttagcttccttagctcctgaaaatctcgataactcaaaaaatacgcccggtagtgatcttatttcattatggtgaaagttggaacctcttacgtgccgatcaacgtctcattttcgccaaaagttggcccagggcttcccggtatcaacagggacaccaggatttatttattctgcgaagtgatcttccgtcacaggtatttattcgcgataagctcatggagcggcgtaaccgtcgcacaggaaggacagagaaagcgcggatctgggaagtgacggacagaacggtcaggacctggattggggaggcggttgccgccgctgctgctgacggtgtgacgttctctgttccggtcacaccacatacgttccgccattcctatgcgatgcacatgctgtatgccggtataccgctgaaagttctgcaaagcctgatgggacataagtccatcagttcaacggaagtctacacgaaggtttttgcgctggatgtggctgcccggcaccgggtgcagtttgcgatgccggagtctgatgcggttgcgatgctgaaacaattatcctgagaataaatgccttggcctttatatggaaatgtggaactgagtggatatgctgtttttgtctgttaaacagagaagctggctgttatccactgagaagcgaacgaaacagtcgggaaaatctcccattatcgtagagatccgcattattaatctcaggagcctgtgtagcgtttataggaagtagtgttctgtcatgatgcctgcaagcggtaacgaaaacgatttgaatatgccttcaggaacaatagaaatcttcgtgcggtgttacgttgaagtggagcggattatgtcagcaatggacagaacaacctaatgaacacagaaccatgatgtggtctgtccttttacagccagtagtgctcgccgcagtcgagcgacagggcgaagccctcggctggttgccctcgccgctgggctggcggccgtctatggccctgcaaacgcgccagaaacgccgtcgaagccgtgtgcgagacaccgcggccggccgccggcgttgtggatacctcgcggaaaacttggccctcactgacagatgaggggcggacgttgacacttgaggggccgactcacccggcgcggcgttgacagatgaggggcaggctcgatttcggccggcgacgtggagctggccagcctcgcaaatcggcgaaaacgcctgattttacgcgagtttcccacagatgatgtggacaagcctggggataagtgccctgcggtattgacacttgaggggcgcgactactgacagatgaggggcgcgatccttgacacttgaggggcagagtgctgacagatgaggggcgcacctattgacatttgaggggctgtccacaggcagaaaatccagcatttgcaagggtttccgcccgtttttcggccaccgctaacctgtcttttaacctgcttttaaaccaatatttataaaccttgtttttaaccagggctgcgccctgtgcgcgtgaccgcgcacgccgaaggggggtgcccccccttctcgaaccctcccggtcgagtgagcgaggaagcaccagggaacagcacttatatattctgcttacacacgatgcctgaaaaaacttcccttggggttatccacttatccacggggatatttttataattattttttttatagtttttagatcttcttttttagagcgccttgtaggcctttatccatgctggttctagagaaggtgttgtgacaaattgccctttcagtgtgacaaatcaccctcaaatgacagtcctgtctgtgacaaattgcccttaaccctgtgacaaattgccctcagaagaagctgttttttcacaaagttatccctgcttattgactcttttttatttagtgtgacaatctaaaaacttgtcacacttcacatggatctgtcatggcggaaacagcggttatcaatcacaagaaacgtaaaaatagcccgcgaatcgtccagtcaaacgacctcactgaggcggcatatagtctctcccgggatcaaaaacgtatgctgtatctgttcgttgaccagatcagaaaatctgatggcaccctacaggaacatgacggtatctgcgagatccatgttgctaaatatgctgaaatattcggattgacctctgcggaagccagtaaggatatacggcaggcattgaagagtttcgcggggaaggaagtggttttttatcgccctgaagaggatgccggcgatgaaaaaggctatgaatcttttccttggtttatcaaacgtgcgcacagtccatccagagggctttacagtgtacatatcaacccatatctcattcccttctttatcgggttacagaaccggtttacgcagtttcggcttagtgaaacaaaagaaatcaccaatccgtatgccatgcgtttatacgaatccctgtgtcagtatcgtaagccggatggctcaggcatcgtctctctgaaaatcgactggatcatagagcgttaccagctgcctcaaagttaccagcgtatgcctgacttccgccgccgcttcctgcaggtctgtgttaatgagatcaacagcagaactccaatgcgcctctcatacattgagaaaaagaaaggccgccagacgactcatatcgtattttccttccgcgatatcacttccatgacgacaggatagtctgagggttatctgtcacagatttgagggtggttcgtcacatttgttctgacctactgagggtaatttgtcacagttttgctgtttccttcagcctgcatggattttctcatactttttgaactgtaatttttaaggaagccaaatttgagggcagtttgtcacagttgatttccttctctttcccttcgtcatgtgacctgatatcgggggttagttcgtcatcattgatgagggttgattatcacagtttattactctgaattggctatccgcgtgtgtacctctacctggagtttttcccacggtggatatttcttcttgcgctgagcgtaagagctatctgacagaacagttcttctttgcttcctcgccagttcgctcgctatgctcggttacacggctgcggcg

SEQ ID NO: 6 - DNA, 35283 bp, Artificial Sequence
  Clone pCCI-4K-SARS-CoV-2-DDWDW. Based on SARS-CoV-2.
gatgtgctgcaaggcgattaagttgggtaacgccagggttttcccagtcacgacgttgtaaaacgacggccagtgaattgtaatacgactcactatagggcgaattctagttattaatagtaatcaattacggggtcattagttcatagcccatatatggagttccgcgttacataacttacggtaaatggcccgcctggctgaccgcccaacgacccccgcccattgacgtcaataatgacgtatgttcccatagtaacgccaatagggactttccattgacgtcaatgggtggagtatttacggtaaactgcccacttggcagtacatcaagtgtatcatatgccaagtacgccccctattgacgtcaatgacggtaaatggcccgcctggcattatgcccagtacatgaccttatgggactttcctacttggcagtacatctacgtattagtcatcgctattaccatggtgatgcggttttggcagtacatcaatgggcgtggatagcggtttgactcacggggatttccaagtctccaccccattgacgtcaatgggagtttgttttggcaccaaaatcaacgggactttccaaaatgtcgtaacaactccgccccattgacgcaaatgggcggtaggcgtgtacggtgggaggtctatataagcagagctggtttagtgaaccgtattaaaggtttataccttcccaggtaacaaaccaaccaactttcgatctcttgtagatctgttctctaaacgaactttaaaatctgtgtggctgtcactcggctgcatgcttagtgcactcacgcagtataattaataactaattactgtcgttgacaggacacgagtaactcgtctatcttctgcaggctgcttacggtttcgtccgtgttgcagccgatcatcagcacatctaggtttcgtccgggtgtgaccgaaaggtaagatggagagccttgtccctggtttcaacgagaaaacacacgtccaactcagtttgcctgttttacaggttcgcgacgtgctcgtacgtggctttggagactccgtggaggaggtcttatcagaggcacgtcaacatcttaaagatggcacttgtggcttagtagaagttgaaaaaggcgttttgcctcaacttgaacagccctatgtgttcatcaaacgttcggatgctcgaactgcacctcatggtcatgttatggttgagctggtagcagaactcgaaggcattcagtacggtcgtagtggtgagacacttggtgtccttgtccctcatgtgggcgaaataccagtggcttaccgcaaggttcttcttcgtaagaacggtaataaaggagctggtggccatagttacggcgccgatctaaagtcatttgacttaggcgacgagcttggcactgatccttatgaagattttcaagaaaactggaacactaaacatagcagtggtgttacccgtgaactcatgcgtgagcttaacggaggggcatacactcgctatgtcgataacaacttctgtggccctgatggctaccctcttgagtgcattaaagaccttctagcacgtgctggtaaagcttcatgcactttgtccgaacaactggactttattgacactaagaggggtgtatactgctgccgtgaacatgagcatgaaattgcttggtacacggaacgttctgaaaagagctatgaattgcagacaccttttgaaattaaattggcaaagaaatttgacaccttcaatggggaatgtccaaattttgtatttcccttaaattccataatcaagactattcaaccaagggttgaaaagaaaaagcttgatggctttatgggtagaattcgatctgtctatccagttgcgtcaccaaatgaatgcaaccaaatgtgcctttcaactctcatgaagtgtgatcattgtggtgaaacttcatggcagacgggcgattttgttaaagccacttgcgaattttgtggcactgagaatttgactaaagaaggtgccactacttgtggttacttaccccaaaatgctgttgttaaaatttattgtccagcatgtcacaattcagaagtaggacctgagcatagtcttgccgaataccataatgaatctggcttgaaaaccattcttcgtaagggtggtcgcactattgcctttggaggctgtgtgttctcttatgttggttgccataacaagtgtgcctattgggtcccgcgtgcgagtgcgaacataggttgtaatcatacgggtgtagtaggtgaaggttcggaaggtctaaatgataatctactagaaatactacaaaaagaaaaagtaaatataaatatagtaggtgattttaaactaaatgaagaaatagcgataatattagcgtcgttttcggcgtcgacgagtgcgtttgtagaaacggtaaaaggtttagattataaagcgtttaaacaaatagtagaatcgtgtggtaattttaaagtgacgaaaggtaaagcgaaaaaaggtgcgtggaatataggtgaacaaaaatcgatactaagtccgctatatgcgtttgcgtcggaagcggcgcgtgtagtacgttcgatattttcgcgtacgctagaaacggcgcaaaattcggtacgtgtattacaaaaagcggcgataacgatactagatggtatatcgcaatattcgctacgtctaatagatgcgatgatgtttacgtcggatttagcgacgaataatctagtagtaatggcgtatataacgggtggtgtagtacaattaacgtcgcaatggctaacgaatatatttggtacggtatatgaaaaactaaaaccggtactagattggctagaagaaaaatttaaagaaggtgtagaatttctacgtgatggttgggaaatagtaaaatttatatcgacgtgtgcgtgtgaaatagtaggtggtcaaatagtaacgtgtgcgaaagaaataaaagaatcggtacaaacgttttttaaactagtaaataaatttctagcgctatgtgcggattcgataataataggtggtgcgaaactaaaagcgctaaatctaggtgaaacgtttgtgacgcattcgaaaggtttatatcgtaaatgtgtaaaatcgcgtgaagaaacgggtctactaatgccgctaaaagcgccgaaagaaataatatttttagaaggtgaaacgctaccgacggaagtattaacggaagaagtagtattaaaaacgggtgatttacaaccgttagaacaaccgacgtcggaagcggtagaagcgccgttagtaggtacgccggtatgtataaatggtctaatgttactagaaataaaagatacggaaaaatattgtgcgctagcgccgaatatgatggtaacgaataatacgtttacgctaaaaggtggtgcgccgacgaaagtaacgtttggtgatgatacggtaatagaagtacaaggttataaatcggtaaatataacgtttgaactagatgaacgtatagataaagtactaaatgaaaaatgttcggcgtatacggtagaactaggtacggaagtaaatgaatttgcgtgtgtagtagcggatgcggtaataaaaacgttacaaccggtatcggaattactaacgccgctaggtatagatttagatgaatggtcgatggcgacgtattatttatttgatgaatcgggtgaatttaaattagcgtcgcatatgtattgttcgttttatccgccggatgaagatgaagaagaaggtgattgtgaagaagaagaatttgaaccgtcgacgcaatatgaatatggtacggaagatgattatcaaggtaaaccgttagaatttggtgcgacgtcggcggcgctacaaccggaagaagaacaagaagaagattggttggatgatgattcgcaacaaacggtaggtcaacaagatggttcggaagataatcaaacgacgacgatacaaacgatagtagaagtacaaccgcaattagaaatggaactaacgccggtagtacaaacgatagaagtaaattcgttttcgggttatttaaaactaacggataatgtatatataaaaaatgcggatatagtagaagaagcgaaaaaagtaaaaccgacggtagtagtaaatgcggcgaatgtatatctaaaacatggtggtggtgtagcgggtgcgttaaataaagcgacgaataatgcgatgcaagtagaatcggatgattatatagcgacgaatggtccgctaaaagtaggtggttcgtgtgtattatcgggtcataatctagcgaaacattgtctacatgtagtaggtccgaatgtaaataaaggtgaagatatacaactactaaaatcggcgtatgaaaattttaatcaacatgaagtactactagcgccgttattatcggcgggtatatttggtgcggacccgatacattcgttacgtgtgtgtgtagatacggtacgcacgaatgtatatttagcggtatttgataaaaatctatatgataaactagtatcgtcgtttttagaaatgaaatcggaaaaacaagtagaacaaaaaatagcggaaataccgaaagaagaagtaaaaccgtttataacggaatcgaaaccgtcggtagaacaacgtaaacaagatgataaaaaaataaaagcgtgtgtagaagaagtaacgacgacgctagaagaaacgaaatttctaacagaaaatttattactatatatagatataaatggtaatctacatccggattcggcgacgctagtatcggatatagatataacgtttttaaaaaaagatgcgccgtatatagtaggtgatgtagtacaagaaggtgtattaacggcggtagtaataccgacgaaaaaagcgggtggtacgacggaaatgctggcgaaagcgttacgtaaagtaccgacggataattatataacgacgtacccgggtcaaggtttaaatggttatacggtagaagaagcgaaaacggtactaaaaaaatgtaaatcggcgttttatatactaccgtcgataatatcgaatgaaaaacaagaaatactaggtacggtatcgtggaatttacgtgaaatgctagcgcatgcggaagaaacacgtaaattaatgccggtatgtgtagaaacgaaagcgatagtatcgacgatacaacgtaaatataaaggtataaaaatacaagaaggtgtagtagattatggtgcgcgtttttatttttatacgtcgaaaacgacggtagcgtcgctaataaatacgctaaatgatctaaatgaaacgctagtaacgatgccgctaggttatgtaacgcatggtttaaatttagaagaagcggcgcgttatatgcgttcgctaaaagtaccggcgacggtatcggtatcgtcgccggatgcggtaacggcgtataatggttatctaacgtcgtcgtcgaaaacgccggaagaacattttatagaaacgatatcgctagcgggttcgtataaagattggtcgtattcgggtcaatcgacgcaactaggtatagaatttctaaaacgtggtgataaatcggtatattatacgtcgaatccgacgacgtttcatctagatggtgaagtaataacgtttgataatctaaaaacgctactatcgttacgtgaagtacgtacgataaaagtatttacgacggtagataatataaatctacatacgcaagtagtagatatgtcgatgacatatggacaacaatttggtccgacgtatttagatggtgcggatgttacgaaaataaaaccgcataattcgcatgaaggtaaaacgttttatgtattaccgaatgatgatacgctacgtgtagaagcgtttgaatattatcatacgactgatccgtcgtttctaggtcgttatatgtcggcgttaaatcatacgaaaaaatggaaatatccgcaagtaaatggtttaacgtcgataaaatgggcggataataattgttatctagcgacggcgttattaacgctacaacaaatagaattaaaatttaatccgccggcgctacaagatgcgtattatcgtgcgcgtgcgggtgaagcggcgaatttttgtgcgctaatattagcgtattgtaataaaacggtaggtgaattaggtgatgtacgtgaaacgatgtcgtatttatttcaacatgcgaatttagattcgtgtaaacgtgtattaaatgtagtatgtaaaacgtgtggtcaacaacaaacgacgctaaaaggtgtagaagcggtaatgtatatgggtacgctatcgtatgaacaatttaaaaaaggtgtacaaataccgtgtacgtgtggtaaacaagcgacgaaatatctagtacaacaagaatcgccgtttgtaatgatgtcggcgccgccggcgcaatatgaactaaaacatggtacgtttacgtgtgcgtcggaatatacgggtaattatcaatgtggtcattataaacatataacgtcgaaagaaacgttatattgtatagatggtgcgttacttacgaaatcgtcggaatataaaggtccgataacggatgtattttataaagaaaattcgtatacgacgacgataaaaccggtaacgtataaattagatggtgtagtatgtacggaaatagatccgaaattagataattattataaaaaagataattcgtattttacggaacaaccgatagatctagtaccgaatcaaccatatccgaatgcgtcgtttgataattttaaatttgtatgtgataatataaaatttgcggatgatttaaatcaattaacgggttataaaaaaccggcgtcgcgtgaactaaaagtaacgttttttccggatttaaatggtgatgtagtagcgatagattataaacattatacgccgtcgtttaaaaaaggtgcgaaattattacataaaccgatagtatggcatgtaaataatgcgacgaataaagcgacgtataaaccgaatacgtggtgtatacggtgtctatggagcacgaaaccggtagaaacgtcgaattcgtttgatgtactaaaatcggaagatgcgcaaggtatggataatctagcgtgtgaagatctaaaaccggtatcggaagaagtagtagaaaatccgacgatacaaaaagatgtactggaatgtaatgtaaaaacgacggaagtagtaggtgatataatactaaaaccggctaataattcgttaaaaataacggaagaagtaggtcatacggatctaatggcggcgtatgtagataattcgtcgctaacgataaaaaaaccgaatgaattatcgcgtgtattaggtttaaaaacgctagcgacgcatggtttagctgctgtaaattcggtaccgtgggatacgatagcgaattatgcgaaaccgtttctaaataaagtagtatcgacgacgacgaatatagtaacgcgatgtttaaatcgtgtatgtacgaattatatgccgtatttttttacgttattactacaattatgtacgtttacgcgatcgacgaattcgcgtataaaagcgtcgatgccgacgacgatagcgaaaaatacggtaaaatcggtaggtaaattttgtctagaagcgtcgtttaattatttaaaatcgccgaatttttctaaactaataaatataataatatggtttttactattatcggtatgcctaggttctttaatctactcaaccgctgctttaggtgttttaatgtctaatttaggcatgccttcttactgtactggttacagagaaggctatttgaactctactaatgtcactattgcaacctactgtactggttctataccttgtagtgtttgtcttagtggtttagattctttagacacctatccttctttagaaactatacaaattaccatttcatcttttaaatgggatttaactgcttttggcttagttgcagagtggtttttggcatatattcttttcactaggtttttctatgtacttggattggctgcaatcatgcaattgtttttcagctattttgcagtacattttattagtaattcttggcttatgtggttaataattaatcttgtacaaatggccccgatttcagctatggttagaatgtacatcttctttgcatcattttattatgtatggaaaagttatgtgcatgttgtagacggttgtaattcatcaacttgtatgatgtgttacaaacgtaatagagcaacaagagtcgaatgtacaactattgttaatggtgttagaaggtccttttatgtctatgctaatggaggtaaaggcttttgcaaactacacaattggaattgtgttaattgtgatacattctgtgctggtagtacatttattagtgatgaagttgcgagagacttgtcactacagtttaaaagaccaataaatcctactgaccagtcttcttacatcgttgatagtgttacagtgaagaatggttccatccatctttactttgataaagctggtcaaaagacttatgaaagacattctctctctcattttgttaacttagacaacctgagagctaataacactaaaggttcattgcctattaatgttatagtttttgatggtaaatcaaaatgtgaagaatcatctgcaaaatcagcgtctgtttactacagtcagcttatgtgtcaacctatactgttactagatcaggcattagtgtctgatgttggtgatagtgcggaagttgcagttaaaatgtttgatgcttacgttaatacgttttcatcaacttttaacgtaccaatggaaaaactcaaaacactagttgcaactgcagaagctgaacttgcaaagaatgtgtccttagacaatgtcttatctacttttatttcagcagctcggcaagggtttgttgattcagatgtagaaactaaagatgttgttgaatgtcttaaattgtcacatcaatctgacatagaagttactggcgatagttgtaataactatatgctcacctataacaaagttgaaaacatgacaccccgtgaccttggtgcttgtattgactgtagtgcgcgtcatattaatgcgcaggtagcaaaaagtcacaacattgctttgatatggaacgttaaagatttcatgtcattgtctgaacaactacgaaaacaaatacgtagtgctgctaaaaagaataacttaccttttaagttgacatgtgcaactactagacaagttgttaatgttgtaacaacaaagatagcacttaagggtggtaaaattgttaataattggttgaagcagttaattaaagtaacgctagtatttctatttgtagcggcgatattttatttaataacgccggtacatgtaatgtcgaaacatacggatttttcgtcggaaataataggttataaagcgatagatggtggtgtaactcgtgatatagcgtcgacggatacgtgttttgcgaataaacatgcggattttgatacgtggttttcgcaacgtggtggttcgtatacgaatgataaagcgtgtccgttaatagcggcggtaataacacgtgaagtaggttttgtagtaccgggtttaccgggtacgatattacgtacgacgaatggtgattttttacattttttaccgcgtgtattttcggcggtaggtaatatatgttatacgccgtcgaaactaatagaatatacggattttgcgacgtcggcgtgtgtattagcggcggaatgtacgatatttaaagatgcgtcgggtaaaccggtaccgtattgttatgatacgaatgtactagaaggttcggtagcgtatgaatcgttacgcccggatacacgttatgtactaatggatggttcgataatacaatttccgaatacgtatctagaaggttcggtacgtgtagtaacgacgtttgattcggaatattgtcgtcatggtacgtgtgaacgttcggaagcgggtgtatgtgtatcgacgtcggggcgttgggtactaaataatgattattatcgttcgttaccgggtgtattctgtggtgtagatgcggtaaatttactaacgaatatgtttacgccgctgatacaaccgataggtgcgttagatatatcggcgtcgatagtagcgggtggtatagtagcgatagtagtaacgtgtctagcgtattattttatgcgttttcgtcgtgcgtttggtgaatattcgcatgtagtagcgtttaatacgttactatttctaatgtcttttacagtactatgtttaacgccggtatattcttttttaccgggtgtatattcggtaatatatttatatttaacgttttatctaacgaatgatgtatcgtttttagcgcatatacaatggatggtaatgtttacgccgttagtaccgttttggataacaatagcgtatataatatgtatatcgacgaaacatttttattggtttttttcgaattatctgaaacgtcgtgtagtatttaatggtgtatctttttcgacgtttgaagaagcggcgctatgtacatttttattaaataaagaaatgtatctaaaattacgttcggatgtactattaccgctaacgcaatataatcgttatttagcgctatataataaatataaatatttttcgggtgcgatggatacgacgtcgtatcgtgaagcggcgtgttgtcatctagcgaaagcgctaaatgatttttcgaattcgggttcggatgtactatatcaaccgccgcaaacgtcgataacgtcggcggtattacaatcgggttttcgtaaaatggcgtttccgtcgggtaaagtagaaggttgtatggtacaagtaacgtgtggtacgacgacgctaaatggtctatggctagatgatgtagtatattgtccgcgtcatgtaatatgtacgtcggaagatatgctaaatccgaattatgaagatttactaatacgtaaatcgaatcataattttttagtacaagcgggtaatgtacaactacgtgtaataggtcattcgatgcaaaattgtgtactaaaactaaaagtagatacggcgaatccgaaaacaccgaaatataaatttgtacgtatacaaccgggtcaaacgttttcggtattagcgtgttataatggttctccgtcgggtgtatatcaatgtgcgatgcgtccgaattttacgattaaaggttcgtttctaaatggttcgtgtggttcggtaggttttaatatagattatgattgtgtatcgttttgttatatgcatcatatggaattaccgacgggtgtacatgcgggtacggatttagaaggtaatttttatggtccgtttgtagatcgtcaaacagcgcaagcggcgggtacggatacgacgattacggtaaatgtattagcgtggttatatgcggcggtaataaatggtgatcgttggtttctaaatcgttttacgacgacgctaaatgattttaatctagtagcgatgaaatataattatgaaccgctgacacaagatcatgtagatatactaggtccgctatcggcgcaaacgggtatagcggtattagatatgtgtgcgtcgttaaaagaattactacaaaatggtatgaatggtcgtacgatattaggttcggcgttattagaagatgaatttacgccgtttgatgtagtacgtcaatgttcgggtgtaacgtttcaatcggcggtaaaacgtacgataaaaggtacgcatcattggttattactaacgatattaacgtcgctattagtattagtacaatcgacgcaatggtcgttatttttttttttatatgaaaatgcgtttttaccgtttgcgatgggtataatagcgatgtcggcgtttgcgatgatgtttgtaaaacataagcatgcatttctctgtttgtttttgttaccttctcttgccactgtagcttattttaatatggtctatatgcctgctagttgggtgatgcgtattatgacatggttggatatggttgatactagtttgtctggttttaagctaaaagactgtgttatgtatgcatcagctgtagtgttactaatccttatgacagcaagaactgtgtatgatgatggtgctaggagagtgtggacacttatgaatgtcttgacactcgtttataaagtttattatggtaatgctttagatcaagccatttccatgtgggctcttataatctctgttacttctaactactcaggtgtagttacaactgtcatgtttttggccagaggtattgtttttatgtgtgttgagtattgccctattttcttcataactggtaatacacttcagtgtataatgctagtttattgtttcttaggctatttttgtacttgttactttggcctcttttgtttactcaaccgctactttagactgactcttggtgtttatgattacttagtttctacacaggagtttagatatatgaattcacagggactactcccacccaagaatagcatagatgccttcaaactcaacattaaattgttgggtgttggtggcaaaccttgtatcaaagtagccactgtacagtctaaaatgtcagatgtaaagtgcacatcagtagtcttactctcagttttgcaacaactcagagtagaatcatcatctaaattgtgggctcaatgtgtccagttacacaatgacattctcttagctaaagatactactgaagcctttgaaaaaatggtttcactactttctgttttgctttccatgcagggtgctgtagacataaacaagctttgtgaagaaatgctggacaacagggcaaccttacaagctatagcctcagagtttagttcccttccatcatatgcagcttttgctactgctcaagaagcttatgagcaggctgttgctaatggtgattctgaagttgttcttaaaaagttgaagaagtctttgaatgtggctaaatctgaatttgaccgtgatgcagccatgcaacgtaagttggaaaagatggctgatcaagctatgacccaaatgtataaacaggctagatctgaggacaagagggcaaaagttactagtgctatgcagacaatgcttttcactatgcttagaaagttggataatgatgcactcaacaacattatcaacaatgcaagagatggttgtgttcccttgaacataatacctcttacaacagcagccaaactaatggttgtcataccagactataacacatataaaaatacgtgtgatggtacaacatttacttatgcatcagcattgtgggaaatccaacaggttgtagatgcagatagtaaaattgttcaacttagtgaaattagtatggacaattcacctaatttagcatggcctcttattgtaacagctttaagggccaattctgctgtcaaattacagaataatgagcttagtcctgttgcactacgacagatgtcttgtgctgccggtactacacaaactgcttgcactgatgacaatgcgttagcttactacaacacaacaaagggaggtaggtttgtacttgcactgttatccgatttacaggatttgaaatgggctagattccctaagagtgatggaactggtactatctatacagaactggaaccaccttgtaggtttgttacagacacacctaaaggtcctaaagtgaagtatttatactttattaaaggattaaacaacctaaatagaggtatggtacttggtagtttagctgccacagtacgtctacaagctggtaatgcaacagaagtgcctgccaattcaactgtattatctttctgtgcttttgctgtagatgctgctaaagcttacaaagattatctagctagtgggggacaaccaatcactaattgtgttaagatgttgtgtacacacactggtactggtcaggcaataacagttacaccggaagccaatatggatcaagaatcctttggtggtgcatcgtgttgtctgtactgccgttgccacatagatcatccaaatcctaaaggattttgtgacttaaaaggtaagtatgtacaaatacctacaacttgtgctaatgaccctgtgggttttacacttaaaaacacagtctgtaccgtctgcggtatgtggaaaggttatggctgtagttgtgatcaactccgcgaacccatgcttcagtcagctgatgcacaatcgtttttaaacgggtttgcggtgtaagtgcagcccgtcttacaccgtgcggcacaggcactagtactgatgtcgtatacagggcttttgacatctacaatgataaagtagctggttttgctaaattcctaaaaactaattgttgtcgcttccaagaaaaggacgaagatgacaatttaattgattcttactttgtagttaagagacacactttctctaactaccaacatgaagaaacaatttataatttacttaaggattgtccagctgttgctaaacatgacttctttaagtttagaatagacggtgacatggtaccacatatatcacgtcaacgtcttactaaatacacaatggcagacctcgtctatgctttaaggcattttgatgaaggtaattgtgacacattaaaagaaatacttgtcacatacaattgttgtgatgatgattatttcaataaaaaggactggtatgattttgtagaaaacccagatatattacgcgtatacgccaacttaggtgaacgtgtacgccaagctttgttaaaaacagtacaattctgtgatgccatgcgaaatgctggtattgttggtgtactgacattagataatcaagatctcaatggtaactggtatgatttcggtgatttcatacaaaccacgccaggtagtggagttcctgttgtagattcttattattcattgttaatgcctatattaaccttgaccagggctttaactgcagagtcacatgttgacactgacttaacaaagccttacattaagtgggatttgttaaaatatgacttcacggaagagaggttaaaactctttgaccgttattttaaatattgggatcagacataccacccaaattgtgttaactgtttggatgacagatgcattctgcattgtgcaaactttaatgttttattctctacagtgttcccacctacaagttttggaccactagtgagaaaaatatttgttgatggtgttccatttgtagtttcaactggataccacttcagagagctaggtgttgtacataatcaggatgtaaacttacatagctctagacttagttttaaggaattacttgtgtatgctgctgaccctgctatgcacgctgcttctggtaatctattactagataaacgcactacgtgcttttcagtagctgcacttactaacaatgttgcttttcaaactgtcaaacccggtaattttaacaaagacttctatgactttgctgtgtctaagggtttctttaaggaaggaagttctgttgaattaaaacacttcttctttgctcaggatggtaatgctgctatcagcgattatgactactatcgttataatctaccaacaatgtgtgatatcagacaactactatttgtagttgaagttgttgataagtactttgattgttacgatggtggctgtattaatgctaaccaagtcatcgtcaacaacctagacaaatcagctggttttccatttaataaatggggtaaggctagactttattatgattcaatgagttatgaggatcaagatgcacttttcgcatatacaaaacgtaatgtcatccctactataactcaaatgaatcttaagtatgccattagtgcaaagaatagagctcgcaccgtagctggtgtctctatctgtagtactatgaccaatagacagtttcatcaaaaattattgaaatcaatagccgccactagaggagctactgtagtaattggaacaagcaaattctatggtggttggcacaacatgttaaaaactgtttatagtgatgtagaaaaccctcaccttatgggttgggattatcctaaatgtgatagagccatgcctaacatgcttagaattatggcctcacttgttcttgctcgcaaacatacaacgtgttgtagcttgtcacaccgtttctatagattagctaatgagtgtgctcaagtattgagtgaaatggtcatgtgtggcggttcactatatgttaaaccaggtggaacctcatcaggagatgccacaactgcttatgctaatagtgtttttaacatttgtcaagctgtcacggccaatgttaatgcacttttatctactgatggtaacaaaattgccgataagtatgtccgcaatttacaacacagactttatgagtgtctctatagaaatagagatgttgacacagactttgtgaatgagttttacgcatatttgcgtaaacatttctcaatgatgatactctctgacgatgctgttgtgtgtttcaatagcacttatgcatctcaaggtctagtggctagcataaagaactttaagtcagttctttattatcaaaacaatgtttttatgtctgaagcaaaatgttggactgagactgaccttactaaaggacctcatgaattttgctctcaacatacaatgctagttaaacagggtgatgattatgtgtaccttccttacccagatccatcaagaatcctaggggccggctgttttgtagatgatatcgtaaaaacagatggtacacttatgattgaacggttcgtgtctttagctatagatgcttacccacttactaaacatcctaatcaggagtatgctgatgtctttcatttgtacttacaatacataagaaagctacatgatgagttaacaggacacatgttagacatgtattctgttatgcttactaatgataacacttcaaggtattgggaacctgagttttatgaggctatgtacacaccgcatacagtcttacaggctgttggggcttgtgttctttgcaattcacagacttcattaagatgtggtgcttgcatacgtagaccattcttatgttgtaaatgctgttacgaccatgtcatatcaacatcacataaattagtcttgtctgttaatccgtatgtttgcaatgctccaggttgtgatgtcacagatgtgactcaactttacttaggaggtatgagctattattgtaaatcacataaaccacccattagttttccattgtgtgctaatggacaagtttttggtttatataaaaatacatgtgttggtagcgataatgttactgactttaatgcaattgcaacatgtgactggacaaatgctggtgattacattttagctaacacctgtactgaaagactcaagctttttgcagcagaaacgctcaaagctactgaggagacatttaaactgtcttatggtattgctactgtacgtgaagtgctgtctgacagagaattacatctttcatgggaagttggtaaacctagaccaccacttaaccgaaattatgtctttactggttatcgtgtaactaaaaacagtaaagtacaaataggagagtacacctttgaaaaaggtgactatggtgatgctgttgtttaccgaggtacaacaacttacaaattaaatgttggtgattattttgtgctgacatcacatacagtaatgccattaagtgcacctacactagtgccacaagagcactatgttagaattactggcttatacccaacactcaatatctcagatgagttttctagcaatgttgcaaattatcaaaaggttggtatgcaaaagtattctacactccagggaccacctggtactggtaagagtcattttgctattggcctagctctctactacccttctgctcgcatagtgtatacagcttgctctcatgccgctgttgatgcactatgtgagaaggcattaaaatatttgcctatagataaatgtagtagaattatacctgcacgtgctcgtgtagagtgttttgataaattcaaagtgaattcaacattagaacagtatgtcttttgtactgtaaatgcattgcctgagacgacagcagatatagttgtctttgatgaaatttcaatggccacaaattatgatttgagtgttgtcaatgccagattacgtgctaagcactatgtgtacattggcgaccctgctcaattacctgcaccacgcacattgctaactaagggcacactagaaccagaatatttcaattcagtgtgtagacttatgaaaactataggtccagacatgttcctcggaacttgtcggcgttgtcctgctgaaattgttgacactgtgagtgctttggtttatgataataagcttaaagcacataaagacaaatcagctcaatgctttaaaatgttttataagggtgttatcacgcatgatgtttcatctgcaattaacaggccacaaataggcgtggtaagagaattccttacacgtaaccctgcttggagaaaagctgtctttatttcaccttataattcacagaatgctgtagcctcaaagattttgggactaccaactcaaactgttgattcatcacagggctcagaatatgactatgtcatattcactcaaaccactgaaacagctcactcttgtaatgtaaacagatttaatgttgctattaccagagcaaaagtaggcatactttgcataatgtctgatagagacctttatgacaagttgcaatttacaagtcttgaaattccacgtaggaatgtggcaactttacaagctgaaaatgtaacaggactctttaaagattgtagtaaggtaatcactgggttacatcctacacaggcacctacacacctcagtgttgacactaaattcaaaactgaaggtttatgtgttgacatacctggcatacctaaggacatgacctatagaagactcatctctatgatgggttttaaaatgaattatcaagttaatggttaccctaacatgtttatcacccgcgaagaagctataagacatgtacgtgcatggattggcttcgatgtcgaggggtgtcatgctactagagaagctgttggtaccaatttacctttacagctaggtttttctacaggtgttaacctagttgctgtacctacaggttatgttgatacacctaataatacagatttttccagagttagtgctaaaccaccgcctggagatcaatttaaacacctcataccacttatgtacaaaggacttccttggaatgtagtgcgtataaagattgtacaaatgttaagtgacacacttaaaaatctctctgacagagtcgtatttgtcttatgggcacatggctttgagttgacatctatgaagtattttgtgaaaataggacctgagcgcacctgttgtctatgtgatagacgtgccacatgcttttccactgcttcagacacttatgcctgttggcatcattctattggatttgattacgtctataatccgtttatgattgatgttcaacaatggggttttacaggtaacctacaaagcaaccatgatctgtattgtcaagtccatggtaatgcacatgtagctagttgtgatgcaatcatgactaggtgtctagctgtccacgagtgctttgttaagcgtgttgactggactattgaatatcctataattggtgatgaactgaagattaatgcggcttgtagaaaggttcaacacatggttgttaaagctgcattattagcagacaaattcccagttcttcacgacattggtaaccctaaagctattaagtgtgtacctcaagctgatgtagaatggaagttctatgatgcacagccttgtagtgacaaagcttataaaatagaagaattattctattcttatgccacacattctgacaaattcacagatggtgtatgcctattttggaattgcaatgtcgatagatatcctgctaattccattgtttgtagatttgacactagagtgctatctaaccttaacttgcctggttgtgatggtggcagtttgtatgtaaataaacatgcattccacacaccagcttttgataaaagtgcttttgttaatttaaaacaattaccatttttctattactctgacagtccatgtgagtctcatggaaaacaagtagtgtcagatatagattatgtaccactaaagtctgctacgtgtataacacgttgcaatttaggtggtgctgtctgtagacatcatgctaatgagtacagattgtatctcgatgcttataacatgatgatctcagctggctttagcttgtgggtttacaaacaatttgatacttataacctctggaacacttttacaagacttcagagtttagaaaatgtggcttttaatgttgtaaataagggacactttgatggacaacagggtgaagtaccagtttctatcattaataacactgtttacacaaaagttgatggtgttgatgtagaattgtttgaaaataaaacaacattacctgttaatgtagcatttgagctttgggctaagcgcaacattaaaccagtaccagaggtgaaaatactcaataatttgggtgtggacattgctgctaatactgtgatctgggactacaaaagagatgctccagcacatatatctactattggtgtttgttctatgactgacatagccaagaaaccaactgaaacgatttgtgcaccactcactgtcttttttgatggtagagttgatggtcaagtagacttatttagaaatgcccgtaatggtgttcttattacagaaggtagtgttaaaggtttacaaccatctgtaggtcccaaacaagctagtcttaatggagtcacattaattggagaagccgtaaaaacacagttcaattattataagaaagttgatggtgttgtccaacaattacctgaaacttactttactcagagtagaaatttacaagaatttaaacccaggagtcaaatggaaattgatttcttagaattagctatggatgaattcattgaacggtataaattagaaggctatgccttcgaacatatcgtttatggagattttagtcatagtcagttaggtggtttacatctactgattggactagctaaacgttttaaggaatcaccttttgaattagaagattttattcctatggacagtacagttaaaaactatttcataacagatgcgcaaacaggttcatctaagtgtgtgtgttctgttattgatttattacttgatgattttgttgaaataataaaatcccaagatttatctgtagtttctaaggttgtcaaagtgactattgactatacagaaatttcatttatgctttggtgtaaagatggccatgtagaaacattttacccaaaattacaatctagtcaagcgtggcaaccgggtgttgctatgcctaatctttacaaaatgcaaagaatgctattagaaaagtgtgaccttcaaaattatggtgatagtgcaacattacctaaaggcataatgatgaatgtcgcaaaatatactcaactgtgtcaatatttaaacacattaacattagctgtaccctataatatgagagttatacattttggtgctggttctgataaaggagttgcaccaggtacagctgttttaagacagtggttgcctacgggtacgctgcttgtcgattcagatcttaatgactttgtctctgatgcagattcaactttgattggtgattgtgcaactgtacatacagctaataaatgggatctcattattagtgatatgtacgaccctaagactaaaaatgttacaaaagaaaatgactctaaagagggttttttcacttacatttgtgggtttatacaacaaaagctagctcttggaggttccgtggctataaagataacagaacattcttggaatgctgatctttataagctcatgggacacttcgcatggtggacagcctttgttactaatgtgaatgcgtcatcatctgaagcatttttaattggatgtaattatcttggcaaaccacgcgaacaaatagatggttatgtcatgcatgcaaattacatattttggaggaatacaaatccaattcagttgtcttcctattctttatttgacatgagtaaatttccccttaaattaaggggtactgctgttatgtctttaaaagaaggtcaaatcaatgatatgattttatctcttcttagtaaaggtagacttataattagagaaaacaacagagttgttatttctagtgatgttcttgttaacaactaaacgaacaatgtttgtttttcttgttttattgccactagtctctagtcagtgtgttaatcttacaaccagaactcaattaccccctgcatacactaattctttcacacgtggtgtttattaccctgacaaagttttcagatcctcagttttacattcaactcaggacttgttcttacctttcttttccaatgttacttggttccatgctatacatgtctctgggaccaatggtactaagaggtttgataaccctgtcctaccatttaatgatggtgtttattttgcttccactgagaagtctaacataataagaggctggatttttggtactactttagattcgaagacccagtccctacttattgttaataacgctactaatgttgttattaaagtctgtgaatttcaattttgtaatgatccatttttgggtgtttattaccacaaaaacaacaaaagttggatggaaagtgagttcagagtttattctagtgcgaataattgcacttttgaatatgtctctcagccttttcttatggaccttgaaggaaaacagggtaatttcaaaaatcttagggaatttgtgtttaagaatattgatggttattttaaaatatattctaagcacacgcctattaatttagtgcgtgatctcccccagggtttttcggctttagaaccattggtagatttgccaataggtattaacatcactaggtttcaaactttacttgctttacatagaagttatttgactcctggtgattcttcttcaggttggacagctggtgctgcagcttattatgtgggttatcttcaacctaggacttttctattaaaatataatgaaaatggaaccattacagatgctgtagactgtgcacttgaccctctctcagaaacaaagtgtacgttgaaatccttcactgtagaaaaaggaatctatcaaacttctaactttagagtccaaccaacagaatctattgttagatttcctaatattacaaacttgtgcccttttggtgaagtttttaacgccaccagatttgcatctgtttatgcttggaacaggaagagaatcagcaactgtgttgctgattattctgtcctatataattccgcatcattttccacttttaagtgttatggagtgtctcctactaaattaaatgatctctgctttactaatgtctatgcagattcatttgtaattagaggtgatgaagtcagacaaatcgctccagggcaaactggaaagattgctgattataattataaattaccagatgattttacaggctgcgttatagcttggaattctaacaatcttgattctaaggttggtggtaattataattacctgtatagattgtttaggaagtctaatctcaaaccttttgagagagatatttcaactgaaatctatcaggccggtagcacaccttgtaatggtgttgaaggttttaattgttactttcctttacaatcatatggtttccaacccactaatggtgttggttaccaaccatacagagtagtagtactttcttttgaacttctacatgcaccagcaactgtttgtggacctaaaaagtctactaatttggttaaaaacaaatgtgtcaatttcaacttcaatggtttaacaggcacaggtgttcttactgagtctaacaaaaagtttctgcctttccaacaatttggcagagacattgctgacactactgatgctgtccgtgatccacagacacttgagattcttgacattacaccatgttcttttggtggtgtcagtgttataacaccaggaacaaatacttctaaccaggttgctgttctttatcaggatgttaactgcacagaagtccctgttgctattcatgcagatcaacttactcctacttggcgtgtttattctacaggttctaatgtttttcaaacacgtgcaggctgtttaataggggctgaacatgtcaacaactcatatgagtgtgacatacccattggtgcaggtatatgcgctagttatcagactcagactaattctcctcggcgggcacgtagtgtagctagtcaatccatcattgcctacactatgtcacttggtgcagaaaattcagttgcttactctaataactctattgccatacccacaaattttactattagtgttaccacagaaattctaccagtgtctatgaccaagacatcagtagattgtacaatgtacatttgtggtgattcaactgaatgcagcaatcttttgttgcaatatggcagtttttgtacacaattaaaccgtgctttaactggaatagctgttgaacaagacaaaaacacccaagaagtttttgcacaagtcaaacaaatttacaaaacaccaccaattaaagattttggtggttttaatttttcacaaatattaccagatccatcaaaaccaagcaagaggtcatttattgaagatctacttttcaacaaagtgacacttgcagatgctggcttcatcaaacaatatggtgattgccttggtgatattgctgctagagacctcatttgtgcacaaaagtttaacggccttactgttttgccacctttgctcacagatgaaatgattgctcaatacacttctgcactgttagcgggtacaatcacttctggttggacctttggtgcaggtgctgcattacaaataccatttgctatgcaaatggcttataggtttaatggtattggagttacacagaatgttctctatgagaaccaaaaattgattgccaaccaatttaatagtgctattggcaaaattcaagactcactttcttccacagcaagtgcacttggaaaacttcaagatgtggtcaaccaaaatgcacaagctttaaacacgcttgttaaacaacttagctccaattttggtgcaatttcaagtgttttaaatgatatcctttcacgtcttgacaaagttgaggctgaagtgcaaattgataggttgatcacaggcagacttcaaagtttgcagacatatgtgactcaacaattaattagagctgcagaaatcagagcttctgctaatcttgctgctactaaaatgtcagagtgtgtacttggacaatcaaaaagagttgatttttgtggaaagggctatcatcttatgtccttccctcagtcagcacctcatggtgtagtcttcttgcatgtgacttatgtccctgcacaagaaaagaacttcacaactgctcctgccatttgtcatgatggaaaagcacactttcctcgtgaaggtgtctttgtttcaaatggcacacactggtttgtaacacaaaggaatttttatgaaccacaaatcattactacagacaacacatttgtgtctggtaactgtgatgttgtaataggaattgtcaacaacacagtttatgatcctttgcaacctgaattagactcattcaaggaggagttagataaatattttaagaatcatacatcaccagatgttgatttaggtgacatctctggcattaatgcttcagttgtaaacattcaaaaagaaattgaccgcctcaatgaggttgccaagaatttaaatgaatctctcatcgatctccaagaacttggaaagtatgagcagtatataaaatggccatggtacatttggctaggttttatagctggcttgattgccatagtaatggtgacaattatgctttgctgtatgaccagttgctgtagttgtctcaagggctgttgttcttgtggatcctgctgcaaatttgatgaagacgactctgagccagtgctcaaaggagtcaaattacattacacataaacgaacttatggatttgtttatgagaatcttcacaattggaactgtaactttgaagcaaggtgaaatcaaggatgctactccttcagattttgttcgcgctactgcaacgataccgatacaagcctcactccctttcggatggcttattgttggcgttgcacttcttgctgtttttcagagcgcttccaaaatcataaccctcaaaaagagatggcaactagcactctccaagggtgttcactttgtttgcaacttgctgttgttgtttgtaacagtttactcacaccttttgctcgttgctgctggccttgaagccccttttctctatctttatgctttagtctacttcttgcagagtataaactttgtaagaataataatgaggctttggctttgctggaaatgccgttccaaaaacccattactttatgatgccaactattttctttgctggcatactaattgttacgactattgtataccttacaatagtgtaacttcttcaattgtcattacttcaggtgatggcacaacaagtcctatttctgaacatgactaccagattggtggttatactgaaaaatgggaatctggagtaaaagactgtgttgtattacacagttacttcacttcagactattaccagctgtactcaactcaattgagtacagacactggtgttgaacatgttaccttcttcatctacaataaaattgttgatgagcctgaagaacatgtccaaattcacacaatcgacggttcatccggagttgttaatccagtaatggaaccaatttatgatgaaccgacgacgactactagcgtgcctttgtaagcacaagctgatgagtacgaacttatgtactcattcgtttcggaagagacaggtacgttaatagttaatagcgtacttctttttcttgctttcgtggtattcttgctagttacactagccatccttactgcgcttcgattgtgtgcgtactgctgcaatattgttaacgtgagtcttgtaaaaccttctttttacgtttactctcgtgttaaaaatctgaattcttctagagttcctgatcttctggtctaaacgaactaaatattatattagtttttctgtttggaactttaattttagccatggcagattccaacggtactattaccgttgaagagcttaaaaagctccttgaacaatggaacctagtaataggtttcctattccttacatggatttgtcttctacaatttgcctatgccaacaggaataggtttttgtatataattaagttaattttcctctggctgttatggccagtaactttagcttgttttgtgcttgctgctgtttacagaataaattggatcaccggtggaattgctatcgcaatggcttgtcttgtaggcttgatgtggctcagctacttcattgcttctttcagactgtttgcgcgtacgcgatccatgtggtcattcaatccagaaactaacattcttctcaacgtgccactccatggcactattctgaccagaccgcttctagaaagtgaactcgtaatcggagctgtgatccttcgtggacatcttcgtattgctggacaccatctaggacgctgtgacatcaaggacctgcctaaagaaatcactgttgctacatcacgaacgctttcttattacaaattgggagcttcgcagcgtgtagcaggtgactcaggttttgctgcatacagtcgctacaggattggcaactataaattaaacacagaccattccagtagcagtgacaatattgctttgcttgtacagtaagtgacaacagatgtttcatctcgttgactttcaggttactatagcagagatattactaattattatgaggacttttaaagtttccatttggaatcttgattacatcataaacctcataattaaaaatttatctaagtcactaactgagaataaatattctcaattagatgaagagcaaccaatggagattgattaaacgaacatgaaaattattcttttcttggcactgataacactcgctacttgtgagctttatcactaccaagagtgtgttagaggtacaacagtacttttaaaagaaccttgctcttctggaacatacgagggcaattcaccatttcatcctctagctgataacaaatttgcactgacttgctttagcactcaatttgcttttgcttgtcctgacggcgtaaaacacgtctatcagttacgtgccagatcagtttcacctaaactgttcatcagacaagaggaagttcaagaactttactctccaatttttcttattgttgcggcaatagtgtttataacactttgcttcacactcaaaagaaagacagaatgattgaactttcattaattgacttctatttgtgctttttagcctttctgctattccttgttttaattatgcttattatcttttggttctcacttgaactgcaagatcataatgaaacttgtcacgcctaaacgaacatgaaatttcttgttttcttaggaatcatcacaactgtagctgcatttcaccaagaatgtagtttacagtcatgtactcaacatcaaccatatgtagttgatgacccgtgtcctattcacttctattctaaatggtatattagagtaggagctagaaaatcagcacctttaattgaattgtgcgtggatgaggctggttctaaatcacccattcagtacatcgatatcggtaattatacagtttcctgtttaccttttacaattaattgccaggaacctaaattgggtagtcttgtagtgcgttgttcgttctatgaagactttttagagtatcatgacgttcgtgttgttttagatttcatctaaacgaacaaactaaaatgtctgataatggaccccaaaatcagcgaaatgcaccccgcattacgtttggtggaccctcagattcaactggcagtaaccagaatggagaacgcagtggggcgcgatcaaaacaacgtcggccccaaggtttacccaataatactgcgtcttggttcaccgctctcactcaacatggcaaggaagaccttaaattccctcgaggacaaggcgttccaattaacaccaatagcagtccagatgaccaaattggctactaccgaagagctaccagacgaattcgtggtggtgacggtaaaatgaaagatctcagtccaagatggtatttctactacctaggaactgggccagaagctggacttccctatggtgctaacaaagacggcatcatatgggttgcaactgagggagccttgaatacaccaaaagatcacattggcacccgcaatcctgctaacaatgctgcaatcgtgctacaacttcctcaaggaacaacattgccaaaaggcttctacgcagaagggagcagaggcggcagtcaagcctcttctcgttcctcatcacgtagtcgcaacagttcaagaaattcaactccaggcagcagtaggggaacttctcctgctagaatggctggcaatggcggtgatgctgctcttgctttgctgctgcttgacagattgaaccagcttgagagcaaaatgtctggtaaaggccaacaacaacaaggccaaactgtcactaagaaatctgctgctgaggcttctaagaagcctcggcaaaaacgtactgccactaaagcatacaatgtaacacaagctttcggcagacgtggtccagaacaaacccaaggaaattttggggaccaggaactaatcagacaaggaactgattacaaacattggccgcaaattgcacaatttgcccccagcgcttcagcgttcttcggaatgtcgcgcattggcatggaagtcacaccttcgggaacgtggttgacctacacaggtgccatcaaattggatgacaaagatccaaatttcaaagatcaagtcattttgctgaataagcatattgacgcatacaaaacattcccaccaacagagcctaaaaaggacaaaaagaagaaggctgatgaaactcaagccttaccgcagagacagaagaaacagcaaactgtgactcttcttcctgctgcagatttggatgatttctccaaacaattgcaacaatccatgagcagtgctgactcaactcaggcctaaactcatgcagaccacacaaggcagatgggctatataaacgttttcgcttttccgtttacgatatatagtctactcttgtgcagaatgaattctcgtaactacatagcacaagtagatgtagttaactttaatctcacatagcaatctttaatcagtgtgtaacattagggaggacttgaaagagccaccacattttcaccgaggccacgcggagtacgatcgagtgtacagtgaacaatgctagggagagctgcctatatggaagagccctaatgtgtaaaattaattttagtagtgctatccccatgtgattttaatagcttcttaggagaatgacaaaaaaaaaaaaaaaaaaaaaaaaaaaaaaaaaaaaaaaaaaaaaaaaaaaaaaaaaaagggtcggcatggcatctccacctcctcgcggtccgacctgggcatccgaaggaggacgcacgtccactcggatggctaagggagcagcacactggcggccgttactagggccgcgcccttcccaacagttgcgcagcctgaatggcgaatggagatccaatttttaagtgtataatgtgttaaactactgattctaattgtttgtgtattttagattcacagtcccaaggctcatttcaggcccctcagtcctcacagtctgttcatgatcataatcagccataccacatttgtagaggttttacttgctttaaaaaacctcccacacctccccctgaacctgaaacataaaatgaatgcaattgttgttgttaacttgtttattgcagcttataatggttacaaataaagcaatagcatcacaaatttcacaaataaagcatttttttcactgcattctagttgtggtttgtccaaactcatcaatgtatcttaaagcttgagtattctatagtctcacctaaatagcttggcgtaatcatggtcatagctgtttcctgtgtgaaattgttatccgctcacaattccacacaacatacgagccggaagcataaagtgtaaagcctggggtgcctaatgagtgagctaactcacattaattgcgttgcgctcactgcccgctttccagtcgggaaacctgtcgtgccagctgcattaatgaatcggccaacgcgaaccccttgcggccgcccgggccgtcgaccaattctcatgtttgacagcttatcatcgaatttctgccattcatccgcttattatcacttattcaggcgtagcaaccaggcgtttaagggcaccaataactgccttaaaaaaattacgccccgccctgccactcatcgcagtactgttgtaattcattaagcattctgccgacatggaagccatcacaaacggcatgatgaacctgaatcgccagcggcatcagcaccttgtcgccttgcgtataatatttgcccatggtgaaaacgggggcgaagaagttgtccatattggccacgtttaaatcaaaactggtgaaactcacccagggattggctgagacgaaaaacatattctcaataaaccctttagggaaataggccaggttttcaccgtaacacgccacatcttgcgaatatatgtgtagaaactgccggaaatcgtcgtggtattcactccagagcgatgaaaacgtttcagtttgctcatggaaaacggtgtaacaagggtgaacactatcccatatcaccagctcaccgtctttcattgccatacgaaattccggatgagcattcatcaggcgggcaagaatgtgaataaaggccggataaaacttgtgcttatttttctttacggtctttaaaaaggccgtaatatccagctgaacggtctggttataggtacattgagcaactgactgaaatgcctcaaaatgttctttacgatgccattgggatatatcaacggtggtatatccagtgatttttttctccattttagcttccttagctcctgaaaatctcgataactcaaaaaatacgcccggtagtgatcttatttcattatggtgaaagttggaacctcttacgtgccgatcaacgtctcattttcgccaaaagttggcccagggcttcccggtatcaacagggacaccaggatttatttattctgcgaagtgatcttccgtcacaggtatttattcgcgataagctcatggagcggcgtaaccgtcgcacaggaaggacagagaaagcgcggatctgggaagtgacggacagaacggtcaggacctggattggggaggcggttgccgccgctgctgctgacggtgtgacgttctctgttccggtcacaccacatacgttccgccattcctatgcgatgcacatgctgtatgccggtataccgctgaaagttctgcaaagcctgatgggacataagtccatcagttcaacggaagtctacacgaaggtttttgcgctggatgtggctgcccggcaccgggtgcagtttgcgatgccggagtctgatgcggttgcgatgctgaaacaattatcctgagaataaatgccttggcctttatatggaaatgtggaactgagtggatatgctgtttttgtctgttaaacagagaagctggctgttatccactgagaagcgaacgaaacagtcgggaaaatctcccattatcgtagagatccgcattattaatctcaggagcctgtgtagcgtttataggaagtagtgttctgtcatgatgcctgcaagcggtaacgaaaacgatttgaatatgccttcaggaacaatagaaatcttcgtgcggtgttacgttgaagtggagcggattatgtcagcaatggacagaacaacctaatgaacacagaaccatgatgtggtctgtccttttacagccagtagtgctcgccgcagtcgagcgacagggcgaagccctcggctggttgccctcgccgctgggctggcggccgtctatggccctgcaaacgcgccagaaacgccgtcgaagccgtgtgcgagacaccgcggccggccgccggcgttgtggatacctcgcggaaaacttggccctcactgacagatgaggggcggacgttgacacttgaggggccgactcacccggcgcggcgttgacagatgaggggcaggctcgatttcggccggcgacgtggagctggccagcctcgcaaatcggcgaaaacgcctgattttacgcgagtttcccacagatgatgtggacaagcctggggataagtgccctgcggtattgacacttgaggggcgcgactactgacagatgaggggcgcgatccttgacacttgaggggcagagtgctgacagatgaggggcgcacctattgacatttgaggggctgtccacaggcagaaaatccagcatttgcaagggtttccgcccgtttttcggccaccgctaacctgtcttttaacctgcttttaaaccaatatttataaaccttgtttttaaccagggctgcgccctgtgcgcgtgaccgcgcacgccgaaggggggtgcccccccttctcgaaccctcccggtcgagtgagcgaggaagcaccagggaacagcacttatatattctgcttacacacgatgcctgaaaaaacttcccttggggttatccacttatccacggggatatttttataattattttttttatagtttttagatcttcttttttagagcgccttgtaggcctttatccatgctggttctagagaaggtgttgtgacaaattgccctttcagtgtgacaaatcaccctcaaatgacagtcctgtctgtgacaaattgcccttaaccctgtgacaaattgccctcagaagaagctgttttttcacaaagttatccctgcttattgactcttttttatttagtgtgacaatctaaaaacttgtcacacttcacatggatctgtcatggcggaaacagcggttatcaatcacaagaaacgtaaaaatagcccgcgaatcgtccagtcaaacgacctcactgaggcggcatatagtctctcccgggatcaaaaacgtatgctgtatctgttcgttgaccagatcagaaaatctgatggcaccctacaggaacatgacggtatctgcgagatccatgttgctaaatatgctgaaatattcggattgacctctgcggaagccagtaaggatatacggcaggcattgaagagtttcgcggggaaggaagtggttttttatcgccctgaagaggatgccggcgatgaaaaaggctatgaatcttttccttggtttatcaaacgtgcgcacagtccatccagagggctttacagtgtacatatcaacccatatctcattcccttctttatcgggttacagaaccggtttacgcagtttcggcttagtgaaacaaaagaaatcaccaatccgtatgccatgcgtttatacgaatccctgtgtcagtatcgtaagccggatggctcaggcatcgtctctctgaaaatcgactggatcatagagcgttaccagctgcctcaaagttaccagcgtatgcctgacttccgccgccgcttcctgcaggtctgtgttaatgagatcaacagcagaactccaatgcgcctctcatacattgagaaaaagaaaggccgccagacgactcatatcgtattttccttccgcgatatcacttccatgacgacaggatagtctgagggttatctgtcacagatttgagggtggttcgtcacatttgttctgacctactgagggtaatttgtcacagttttgctgtttccttcagcctgcatggattttctcatactttttgaactgtaatttttaaggaagccaaatttgagggcagtttgtcacagttgatttccttctctttcccttcgtcatgtgacctgatatcgggggttagttcgtcatcattgatgagggttgattatcacagtttattactctgaattggctatccgcgtgtgtacctctacctggagtttttcccacggtggatatttcttcttgcgctgagcgtaagagctatctgacagaacagttcttctttgcttcctcgccagttcgctcgctatgctcggttacacggctgcggcg

SEQ ID NO: 7 - DNA, 35283 bp, Artificial Sequence
  Clone pCCI-4K-SARS-CoV-2-DDWWD. Based on SARS-CoV-2
gatgtgctgcaaggcgattaagttgggtaacgccagggttttcccagtcacgacgttgtaaaacgacggccagtgaattgtaatacgactcactatagggcgaattctagttattaatagtaatcaattacggggtcattagttcatagcccatatatggagttccgcgttacataacttacggtaaatggcccgcctggctgaccgcccaacgacccccgcccattgacgtcaataatgacgtatgttcccatagtaacgccaatagggactttccattgacgtcaatgggtggagtatttacggtaaactgcccacttggcagtacatcaagtgtatcatatgccaagtacgccccctattgacgtcaatgacggtaaatggcccgcctggcattatgcccagtacatgaccttatgggactttcctacttggcagtacatctacgtattagtcatcgctattaccatggtgatgcggttttggcagtacatcaatgggcgtggatagcggtttgactcacggggatttccaagtctccaccccattgacgtcaatgggagtttgttttggcaccaaaatcaacgggactttccaaaatgtcgtaacaactccgccccattgacgcaaatgggcggtaggcgtgtacggtgggaggtctatataagcagagctggtttagtgaaccgtattaaaggtttataccttcccaggtaacaaaccaaccaactttcgatctcttgtagatctgttctctaaacgaactttaaaatctgtgtggctgtcactcggctgcatgcttagtgcactcacgcagtataattaataactaattactgtcgttgacaggacacgagtaactcgtctatcttctgcaggctgcttacggtttcgtccgtgttgcagccgatcatcagcacatctaggtttcgtccgggtgtgaccgaaaggtaagatggagagccttgtccctggtttcaacgagaaaacacacgtccaactcagtttgcctgttttacaggttcgcgacgtgctcgtacgtggctttggagactccgtggaggaggtcttatcagaggcacgtcaacatcttaaagatggcacttgtggcttagtagaagttgaaaaaggcgttttgcctcaacttgaacagccctatgtgttcatcaaacgttcggatgctcgaactgcacctcatggtcatgttatggttgagctggtagcagaactcgaaggcattcagtacggtcgtagtggtgagacacttggtgtccttgtccctcatgtgggcgaaataccagtggcttaccgcaaggttcttcttcgtaagaacggtaataaaggagctggtggccatagttacggcgccgatctaaagtcatttgacttaggcgacgagcttggcactgatccttatgaagattttcaagaaaactggaacactaaacatagcagtggtgttacccgtgaactcatgcgtgagcttaacggaggggcatacactcgctatgtcgataacaacttctgtggccctgatggctaccctcttgagtgcattaaagaccttctagcacgtgctggtaaagcttcatgcactttgtccgaacaactggactttattgacactaagaggggtgtatactgctgccgtgaacatgagcatgaaattgcttggtacacggaacgttctgaaaagagctatgaattgcagacaccttttgaaattaaattggcaaagaaatttgacaccttcaatggggaatgtccaaattttgtatttcccttaaattccataatcaagactattcaaccaagggttgaaaagaaaaagcttgatggctttatgggtagaattcgatctgtctatccagttgcgtcaccaaatgaatgcaaccaaatgtgcctttcaactctcatgaagtgtgatcattgtggtgaaacttcatggcagacgggcgattttgttaaagccacttgcgaattttgtggcactgagaatttgactaaagaaggtgccactacttgtggttacttaccccaaaatgctgttgttaaaatttattgtccagcatgtcacaattcagaagtaggacctgagcatagtcttgccgaataccataatgaatctggcttgaaaaccattcttcgtaagggtggtcgcactattgcctttggaggctgtgtgttctcttatgttggttgccataacaagtgtgcctattgggtcccgcgtgcgagtgcgaacataggttgtaatcatacgggtgtagtaggtgaaggttcggaaggtctaaatgataatctactagaaatactacaaaaagaaaaagtaaatataaatatagtaggtgattttaaactaaatgaagaaatagcgataatattagcgtcgttttcggcgtcgacgagtgcgtttgtagaaacggtaaaaggtttagattataaagcgtttaaacaaatagtagaatcgtgtggtaattttaaagtgacgaaaggtaaagcgaaaaaaggtgcgtggaatataggtgaacaaaaatcgatactaagtccgctatatgcgtttgcgtcggaagcggcgcgtgtagtacgttcgatattttcgcgtacgctagaaacggcgcaaaattcggtacgtgtattacaaaaagcggcgataacgatactagatggtatatcgcaatattcgctacgtctaatagatgcgatgatgtttacgtcggatttagcgacgaataatctagtagtaatggcgtatataacgggtggtgtagtacaattaacgtcgcaatggctaacgaatatatttggtacggtatatgaaaaactaaaaccggtactagattggctagaagaaaaatttaaagaaggtgtagaatttctacgtgatggttgggaaatagtaaaatttatatcgacgtgtgcgtgtgaaatagtaggtggtcaaatagtaacgtgtgcgaaagaaataaaagaatcggtacaaacgttttttaaactagtaaataaatttctagcgctatgtgcggattcgataataataggtggtgcgaaactaaaagcgctaaatctaggtgaaacgtttgtgacgcattcgaaaggtttatatcgtaaatgtgtaaaatcgcgtgaagaaacgggtctactaatgccgctaaaagcgccgaaagaaataatatttttagaaggtgaaacgctaccgacggaagtattaacggaagaagtagtattaaaaacgggtgatttacaaccgttagaacaaccgacgtcggaagcggtagaagcgccgttagtaggtacgccggtatgtataaatggtctaatgttactagaaataaaagatacggaaaaatattgtgcgctagcgccgaatatgatggtaacgaataatacgtttacgctaaaaggtggtgcgccgacgaaagtaacgtttggtgatgatacggtaatagaagtacaaggttataaatcggtaaatataacgtttgaactagatgaacgtatagataaagtactaaatgaaaaatgttcggcgtatacggtagaactaggtacggaagtaaatgaatttgcgtgtgtagtagcggatgcggtaataaaaacgttacaaccggtatcggaattactaacgccgctaggtatagatttagatgaatggtcgatggcgacgtattatttatttgatgaatcgggtgaatttaaattagcgtcgcatatgtattgttcgttttatccgccggatgaagatgaagaagaaggtgattgtgaagaagaagaatttgaaccgtcgacgcaatatgaatatggtacggaagatgattatcaaggtaaaccgttagaatttggtgcgacgtcggcggcgctacaaccggaagaagaacaagaagaagattggttggatgatgattcgcaacaaacggtaggtcaacaagatggttcggaagataatcaaacgacgacgatacaaacgatagtagaagtacaaccgcaattagaaatggaactaacgccggtagtacaaacgatagaagtaaattcgttttcgggttatttaaaactaacggataatgtatatataaaaaatgcggatatagtagaagaagcgaaaaaagtaaaaccgacggtagtagtaaatgcggcgaatgtatatctaaaacatggtggtggtgtagcgggtgcgttaaataaagcgacgaataatgcgatgcaagtagaatcggatgattatatagcgacgaatggtccgctaaaagtaggtggttcgtgtgtattatcgggtcataatctagcgaaacattgtctacatgtagtaggtccgaatgtaaataaaggtgaagatatacaactactaaaatcggcgtatgaaaattttaatcaacatgaagtactactagcgccgttattatcggcgggtatatttggtgcggacccgatacattcgttacgtgtgtgtgtagatacggtacgcacgaatgtatatttagcggtatttgataaaaatctatatgataaactagtatcgtcgtttttagaaatgaaatcggaaaaacaagtagaacaaaaaatagcggaaataccgaaagaagaagtaaaaccgtttataacggaatcgaaaccgtcggtagaacaacgtaaacaagatgataaaaaaataaaagcgtgtgtagaagaagtaacgacgacgctagaagaaacgaaatttctaacagaaaatttattactatatatagatataaatggtaatctacatccggattcggcgacgctagtatcggatatagatataacgtttttaaaaaaagatgcgccgtatatagtaggtgatgtagtacaagaaggtgtattaacggcggtagtaataccgacgaaaaaagcgggtggtacgacggaaatgctggcgaaagcgttacgtaaagtaccgacggataattatataacgacgtacccgggtcaaggtttaaatggttatacggtagaagaagcgaaaacggtactaaaaaaatgtaaatcggcgttttatatactaccgtcgataatatcgaatgaaaaacaagaaatactaggtacggtatcgtggaatttacgtgaaatgctagcgcatgcggaagaaacacgtaaattaatgccggtatgtgtagaaacgaaagcgatagtatcgacgatacaacgtaaatataaaggtataaaaatacaagaaggtgtagtagattatggtgcgcgtttttatttttatacgtcgaaaacgacggtagcgtcgctaataaatacgctaaatgatctaaatgaaacgctagtaacgatgccgctaggttatgtaacgcatggtttaaatttagaagaagcggcgcgttatatgcgttcgctaaaagtaccggcgacggtatcggtatcgtcgccggatgcggtaacggcgtataatggttatctaacgtcgtcgtcgaaaacgccggaagaacattttatagaaacgatatcgctagcgggttcgtataaagattggtcgtattcgggtcaatcgacgcaactaggtatagaatttctaaaacgtggtgataaatcggtatattatacgtcgaatccgacgacgtttcatctagatggtgaagtaataacgtttgataatctaaaaacgctactatcgttacgtgaagtacgtacgataaaagtatttacgacggtagataatataaatctacatacgcaagtagtagatatgtcgatgacatatggacaacaatttggtccgacgtatttagatggtgcggatgttacgaaaataaaaccgcataattcgcatgaaggtaaaacgttttatgtattaccgaatgatgatacgctacgtgtagaagcgtttgaatattatcatacgactgatccgtcgtttctaggtcgttatatgtcggcgttaaatcatacgaaaaaatggaaatatccgcaagtaaatggtttaacgtcgataaaatgggcggataataattgttatctagcgacggcgttattaacgctacaacaaatagaattaaaatttaatccgccggcgctacaagatgcgtattatcgtgcgcgtgcgggtgaagcggcgaatttttgtgcgctaatattagcgtattgtaataaaacggtaggtgaattaggtgatgtacgtgaaacgatgtcgtatttatttcaacatgcgaatttagattcgtgtaaacgtgtattaaatgtagtatgtaaaacgtgtggtcaacaacaaacgacgctaaaaggtgtagaagcggtaatgtatatgggtacgctatcgtatgaacaatttaaaaaaggtgtacaaataccgtgtacgtgtggtaaacaagcgacgaaatatctagtacaacaagaatcgccgtttgtaatgatgtcggcgccgccggcgcaatatgaactaaaacatggtacgtttacgtgtgcgtcggaatatacgggtaattatcaatgtggtcattataaacatataacgtcgaaagaaacgttatattgtatagatggtgcgttacttacgaaatcgtcggaatataaaggtccgataacggatgtattttataaagaaaattcgtatacgacgacgataaaaccggtaacgtataaattagatggtgtagtatgtacggaaatagatccgaaattagataattattataaaaaagataattcgtattttacggaacaaccgatagatctagtaccgaatcaaccatatccgaatgcgtcgtttgataattttaaatttgtatgtgataatataaaatttgcggatgatttaaatcaattaacgggttataaaaaaccggcgtcgcgtgaactaaaagtaacgttttttccggatttaaatggtgatgtagtagcgatagattataaacattatacgccgtcgtttaaaaaaggtgcgaaattattacataaaccgatagtatggcatgtaaataatgcgacgaataaagcgacgtataaaccgaatacgtggtgtatacggtgtctatggagcacgaaaccggtagaaacgtcgaattcgtttgatgtactaaaatcggaagatgcgcaaggtatggataatctagcgtgtgaagatctaaaaccggtatcggaagaagtagtagaaaatccgacgatacaaaaagatgtactggaatgtaatgtaaaaacgacggaagtagtaggtgatataatactaaaaccggctaataattcgttaaaaataacggaagaagtaggtcatacggatctaatggcggcgtatgtagataattcgtcgctaacgataaaaaaaccgaatgaattatcgcgtgtattaggtttaaaaacgctagcgacgcatggtttagctgctgtaaattcggtaccgtgggatacgatagcgaattatgcgaaaccgtttctaaataaagtagtatcgacgacgacgaatatagtaacgcgatgtttaaatcgtgtatgtacgaattatatgccgtatttttttacgttattactacaattatgtacgtttacgcgatcgacgaattcgcgtataaaagcgtcgatgccgacgacgatagcgaaaaatacggtaaaatcggtaggtaaattttgtctagaagcgtcgtttaattatttaaaatcgccgaatttttctaaactaataaatataataatatggtttttactattatcggtatgcctaggttctttaatctactcaaccgctgctttaggtgttttaatgtctaatttaggcatgccttcttactgtactggttacagagaaggctatttgaactctactaatgtcactattgcaacctactgtactggttctataccttgtagtgtttgtcttagtggtttagattctttagacacctatccttctttagaaactatacaaattaccatttcatcttttaaatgggatttaactgcttttggcttagttgcagagtggtttttggcatatattcttttcactaggtttttctatgtacttggattggctgcaatcatgcaattgtttttcagctattttgcagtacattttattagtaattcttggcttatgtggttaataattaatcttgtacaaatggccccgatttcagctatggttagaatgtacatcttctttgcatcattttattatgtatggaaaagttatgtgcatgttgtagacggttgtaattcatcaacttgtatgatgtgttacaaacgtaatagagcaacaagagtcgaatgtacaactattgttaatggtgttagaaggtccttttatgtctatgctaatggaggtaaaggcttttgcaaactacacaattggaattgtgttaattgtgatacattctgtgctggtagtacatttattagtgatgaagttgcgagagacttgtcactacagtttaaaagaccaataaatcctactgaccagtcttcttacatcgttgatagtgttacagtgaagaatggttccatccatctttactttgataaagctggtcaaaagacttatgaaagacattctctctctcattttgttaacttagacaacctgagagctaataacactaaaggttcattgcctattaatgttatagtttttgatggtaaatcaaaatgtgaagaatcatctgcaaaatcagcgtctgtttactacagtcagcttatgtgtcaacctatactgttactagatcaggcattagtgtctgatgttggtgatagtgcggaagttgcagttaaaatgtttgatgcttacgttaatacgttttcatcaacttttaacgtaccaatggaaaaactcaaaacactagttgcaactgcagaagctgaacttgcaaagaatgtgtccttagacaatgtcttatctacttttatttcagcagctcggcaagggtttgttgattcagatgtagaaactaaagatgttgttgaatgtcttaaattgtcacatcaatctgacatagaagttactggcgatagttgtaataactatatgctcacctataacaaagttgaaaacatgacaccccgtgaccttggtgcttgtattgactgtagtgcgcgtcatattaatgcgcaggtagcaaaaagtcacaacattgctttgatatggaacgttaaagatttcatgtcattgtctgaacaactacgaaaacaaatacgtagtgctgctaaaaagaataacttaccttttaagttgacatgtgcaactactagacaagttgttaatgttgtaacaacaaagatagcacttaagggtggtaaaattgttaataattggttgaagcagttaattaaagttacacttgtgttcctttttgttgctgctattttctatttaataacacctgttcatgtcatgtctaaacatactgacttttcaagtgaaatcataggatacaaggctattgatggtggtgtcactcgtgacatagcatctacagatacttgttttgctaacaaacatgctgattttgacacatggtttagccagcgtggtggtagttatactaatgacaaagcttgcccattgattgctgcagtcataacaagagaagtgggttttgtcgtgcctggtttgcctggcacgatattacgcacaactaatggtgactttttgcatttcttacctagagtttttagtgcagttggtaacatctgttacacaccatcaaaacttatagagtacactgactttgcaacatcagcttgtgttttggctgctgaatgtacaatttttaaagatgcttctggtaagccagtaccatattgttatgataccaatgtactagaaggttctgttgcttatgaaagtttacgccctgacacacgttatgtgctcatggatggctctattattcaatttcctaacacctaccttgaaggttctgttagagtggtaacaacttttgattctgagtactgtaggcacggcacttgtgaaagatcagaagctggtgtttgtgtatctactagtggtagatgggtacttaacaatgattattacagatctttaccaggagttttctgtggtgtagatgctgtaaatttacttactaatatgtttacaccactaattcaacctattggtgctttggacatatcagcatctatagtagctggtggtattgtagctatcgtagtaacatgccttgcctactattttatgaggtttagaagagcttttggtgaatacagtcatgtagttgcctttaatactttactattccttatgtcattcactgtactctgtttaacaccagtttactcattcttacctggtgtttattctgttatttacttgtacttgacattttatcttactaatgatgtttcttttttagcacatattcagtggatggttatgttcacacctttagtacctttctggataacaattgcttatatcatttgtatttccacaaagcatttctattggttctttagtaattacctaaagagacgtgtagtctttaatggtgtttcctttagtacttttgaagaagctgcgctgtgcacctttttgttaaataaagaaatgtatctaaagttgcgtagtgatgtgctattacctcttacgcaatataatagatacttagctctttataataagtacaagtattttagtggagcaatggatacaactagctacagagaagctgcttgttgtcatctcgcaaaggctctcaatgacttcagtaactcaggttctgatgttctttaccaaccaccacaaacctctatcacctcagctgttttgcagagtggttttagaaaaatggcattcccatctggtaaagttgagggttgtatggtacaagtaacttgtggtacaactacacttaacggtctttggcttgatgacgtagtttactgtccaagacatgtgatctgcacctctgaagacatgcttaaccctaattatgaagatttactcattcgtaagtctaatcataatttcttggtacaggctggtaatgttcaactcagggttattggacattctatgcaaaattgtgtacttaagcttaaggttgatacagccaatcctaagacacctaagtataagtttgttcgcattcaaccaggacagactttttcagtgttagcttgttacaatggttcaccatctggtgtttaccaatgtgctatgaggcccaatttcactattaagggttcattccttaatggttcatgtggtagtgttggttttaacatagattatgactgtgtctctttttgttacatgcaccatatggaattaccaactggagttcatgctggcacagacttagaaggtaacttttatggaccttttgttgacaggcaaacagcacaagcagctggtacggacacaactattacagttaatgttttagcttggttgtacgctgctgttataaatggagacaggtggtttctcaatcgatttaccacaactcttaatgactttaaccttgtggctatgaagtacaattatgaacctctaacacaagaccatgttgacatactaggacctctttctgctcaaactggaattgccgttttagatatgtgtgcttcattaaaagaattactgcaaaatggtatgaatggacgtaccatattgggtagtgctttattagaagatgaatttacaccttttgatgttgttagacaatgctcaggtgttactttccaaagtgcagtgaaaagaacaatcaagggtacacaccactggttgttactcacaattttgacttcacttttagttttagtccagagtactcaatggtctttgttcttttttttgtatgaaaatgcctttttaccttttgctatgggtattattgctatgtctgcttttgcaatgatgtttgtcaaacataagcatgcgtttctatgtttatttttattaccgtcgctagcgacggtagcgtattttaatatggtatatatgccggcgtcgtgggtaatgcgtataatgacgtggttagatatggtagatacgtcgttatcgggttttaaactaaaagattgtgtaatgtatgcgtcggcggtagtattactaatactaatgacggcgcgtacggtatatgatgatggtgcgcgtcgtgtatggacgctaatgaatgtattaacgctagtatataaagtatattatgggaatgcgttagatcaagcgatatcgatgtgggcgctaataatatcggtaacgtcgaattattcgggtgtagtaacgacggtaatgtttttagcgcgtggtatagtatttatgtgtgtagaatattgtccgatattttttataacgggtaatacactacaatgtataatgctagtatattgttttttaggttatttttgtacgtgttattttggtctattttgtttactaaatcgttattttcgtctaacactaggtgtatatgattatttagtatcgacgcaagaatttcgttatatgaattcgcaaggtctactaccgccgaaaaattcgatagatgcgtttaaactaaatataaaattattaggtgtaggtggtaaaccgtgtataaaagtagcgacggtacaatcgaaaatgtcggatgtaaaatgtacatcggtagtattactatcggtattacaacaactacgtgtagaatcgtcgtcgaaattatgggcgcaatgtgtacaattacataatgatatactattagcgaaagatacgacggaagcgtttgaaaaaatggtatcgctactatcggtattactatcgatgcaaggtgcggtagatataaataaactatgtgaagaaatgctagataatcgtgcgacgttacaagcgatagcgtcggaattttcgtcgctaccgtcgtatgcggcgtttgcgacggcgcaagaagcgtatgaacaagcggtagcgaatggtgattcggaagtagtactaaaaaaattaaaaaaatcgttaaatgtagcgaaatcggaatttgatcgtgatgcggcgatgcaacgtaaattagaaaaaatggcggatcaagcgatgacgcaaatgtataaacaagcgcgttcggaagataaacgtgcgaaagtaacgtcggcgatgcaaacgatgctatttacgatgctacgtaaattagataatgatgcgctaaataatataataaataatgcgcgtgatggttgtgtaccgttaaatataataccgctaacgacggcggcgaaactaatggtagtaataccggattataatacatataaaaatacgtgtgatggtacgacgtttacgtatgcgtcggcgttatgggaaatacaacaagtagtagatgcggattcgaaaatagtacaactatcggaaatatcgatggataattcgccgaatttagcgtggccgctaatagtaacggcgttacgtgcgaattcggcggtaaaattacaaaataatgaactatcgccggtagcgctacgacagatgtcttgtgctgccggtactacacaaactgcttgcactgatgacaatgcgttagcttactacaacacaacaaagggaggtaggtttgtacttgcactgttatccgatttacaggatttgaaatgggctagattccctaagagtgatggaactggtactatctatacagaactggaaccaccttgtaggtttgttacagacacacctaaaggtcctaaagtgaagtatttatactttattaaaggattaaacaacctaaatagaggtatggtacttggtagtttagctgccacagtacgtctacaagctggtaatgcaacagaagtgcctgccaattcaactgtattatctttctgtgcttttgctgtagatgctgctaaagcttacaaagattatctagctagtgggggacaaccaatcactaattgtgttaagatgttgtgtacacacactggtactggtcaggcaataacagttacaccggaagccaatatggatcaagaatcctttggtggtgcatcgtgttgtctgtactgccgttgccacatagatcatccaaatcctaaaggattttgtgacttaaaaggtaagtatgtacaaatacctacaacttgtgctaatgaccctgtgggttttacacttaaaaacacagtctgtaccgtctgcggtatgtggaaaggttatggctgtagttgtgatcaactccgcgaacccatgcttcagtcagctgatgcacaatcgtttttaaacgggtttgcggtgtaagtgcagcccgtcttacaccgtgcggcacaggcactagtactgatgtcgtatacagggcttttgacatctacaatgataaagtagctggttttgctaaattcctaaaaactaattgttgtcgcttccaagaaaaggacgaagatgacaatttaattgattcttactttgtagttaagagacacactttctctaactaccaacatgaagaaacaatttataatttacttaaggattgtccagctgttgctaaacatgacttctttaagtttagaatagacggtgacatggtaccacatatatcacgtcaacgtcttactaaatacacaatggcagacctcgtctatgctttaaggcattttgatgaaggtaattgtgacacattaaaagaaatacttgtcacatacaattgttgtgatgatgattatttcaataaaaaggactggtatgattttgtagaaaacccagatatattacgcgtatacgccaacttaggtgaacgtgtacgccaagctttgttaaaaacagtacaattctgtgatgccatgcgaaatgctggtattgttggtgtactgacattagataatcaagatctcaatggtaactggtatgatttcggtgatttcatacaaaccacgccaggtagtggagttcctgttgtagattcttattattcattgttaatgcctatattaaccttgaccagggctttaactgcagagtcacatgttgacactgacttaacaaagccttacattaagtgggatttgttaaaatatgacttcacggaagagaggttaaaactctttgaccgttattttaaatattgggatcagacataccacccaaattgtgttaactgtttggatgacagatgcattctgcattgtgcaaactttaatgttttattctctacagtgttcccacctacaagttttggaccactagtgagaaaaatatttgttgatggtgttccatttgtagtttcaactggataccacttcagagagctaggtgttgtacataatcaggatgtaaacttacatagctctagacttagttttaaggaattacttgtgtatgctgctgaccctgctatgcacgctgcttctggtaatctattactagataaacgcactacgtgcttttcagtagctgcacttactaacaatgttgcttttcaaactgtcaaacccggtaattttaacaaagacttctatgactttgctgtgtctaagggtttctttaaggaaggaagttctgttgaattaaaacacttcttctttgctcaggatggtaatgctgctatcagcgattatgactactatcgttataatctaccaacaatgtgtgatatcagacaactactatttgtagttgaagttgttgataagtactttgattgttacgatggtggctgtattaatgctaaccaagtcatcgtcaacaacctagacaaatcagctggttttccatttaataaatggggtaaggctagactttattatgattcaatgagttatgaggatcaagatgcacttttcgcatatacaaaacgtaatgtcatccctactataactcaaatgaatcttaagtatgccattagtgcaaagaatagagctcgcaccgtagctggtgtctctatctgtagtactatgaccaatagacagtttcatcaaaaattattgaaatcaatagccgccactagaggagctactgtagtaattggaacaagcaaattctatggtggttggcacaacatgttaaaaactgtttatagtgatgtagaaaaccctcaccttatgggttgggattatcctaaatgtgatagagccatgcctaacatgcttagaattatggcctcacttgttcttgctcgcaaacatacaacgtgttgtagcttgtcacaccgtttctatagattagctaatgagtgtgctcaagtattgagtgaaatggtcatgtgtggcggttcactatatgttaaaccaggtggaacctcatcaggagatgccacaactgcttatgctaatagtgtttttaacatttgtcaagctgtcacggccaatgttaatgcacttttatctactgatggtaacaaaattgccgataagtatgtccgcaatttacaacacagactttatgagtgtctctatagaaatagagatgttgacacagactttgtgaatgagttttacgcatatttgcgtaaacatttctcaatgatgatactctctgacgatgctgttgtgtgtttcaatagcacttatgcatctcaaggtctagtggctagcataaagaactttaagtcagttctttattatcaaaacaatgtttttatgtctgaagcaaaatgttggactgagactgaccttactaaaggacctcatgaattttgctctcaacatacaatgctagttaaacagggtgatgattatgtgtaccttccttacccagatccatcaagaatcctaggggccggctgttttgtagatgatatcgtaaaaacagatggtacacttatgattgaacggttcgtgtctttagctatagatgcttacccacttactaaacatcctaatcaggagtatgctgatgtctttcatttgtacttacaatacataagaaagctacatgatgagttaacaggacacatgttagacatgtattctgttatgcttactaatgataacacttcaaggtattgggaacctgagttttatgaggctatgtacacaccgcatacagtcttacaggctgttggggcttgtgttctttgcaattcacagacttcattaagatgtggtgcttgcatacgtagaccattcttatgttgtaaatgctgttacgaccatgtcatatcaacatcacataaattagtcttgtctgttaatccgtatgtttgcaatgctccaggttgtgatgtcacagatgtgactcaactttacttaggaggtatgagctattattgtaaatcacataaaccacccattagttttccattgtgtgctaatggacaagtttttggtttatataaaaatacatgtgttggtagcgataatgttactgactttaatgcaattgcaacatgtgactggacaaatgctggtgattacattttagctaacacctgtactgaaagactcaagctttttgcagcagaaacgctcaaagctactgaggagacatttaaactgtcttatggtattgctactgtacgtgaagtgctgtctgacagagaattacatctttcatgggaagttggtaaacctagaccaccacttaaccgaaattatgtctttactggttatcgtgtaactaaaaacagtaaagtacaaataggagagtacacctttgaaaaaggtgactatggtgatgctgttgtttaccgaggtacaacaacttacaaattaaatgttggtgattattttgtgctgacatcacatacagtaatgccattaagtgcacctacactagtgccacaagagcactatgttagaattactggcttatacccaacactcaatatctcagatgagttttctagcaatgttgcaaattatcaaaaggttggtatgcaaaagtattctacactccagggaccacctggtactggtaagagtcattttgctattggcctagctctctactacccttctgctcgcatagtgtatacagcttgctctcatgccgctgttgatgcactatgtgagaaggcattaaaatatttgcctatagataaatgtagtagaattatacctgcacgtgctcgtgtagagtgttttgataaattcaaagtgaattcaacattagaacagtatgtcttttgtactgtaaatgcattgcctgagacgacagcagatatagttgtctttgatgaaatttcaatggccacaaattatgatttgagtgttgtcaatgccagattacgtgctaagcactatgtgtacattggcgaccctgctcaattacctgcaccacgcacattgctaactaagggcacactagaaccagaatatttcaattcagtgtgtagacttatgaaaactataggtccagacatgttcctcggaacttgtcggcgttgtcctgctgaaattgttgacactgtgagtgctttggtttatgataataagcttaaagcacataaagacaaatcagctcaatgctttaaaatgttttataagggtgttatcacgcatgatgtttcatctgcaattaacaggccacaaataggcgtggtaagagaattccttacacgtaaccctgcttggagaaaagctgtctttatttcaccttataattcacagaatgctgtagcctcaaagattttgggactaccaactcaaactgttgattcatcacagggctcagaatatgactatgtcatattcactcaaaccactgaaacagctcactcttgtaatgtaaacagatttaatgttgctattaccagagcaaaagtaggcatactttgcataatgtctgatagagacctttatgacaagttgcaatttacaagtcttgaaattccacgtaggaatgtggcaactttacaagctgaaaatgtaacaggactctttaaagattgtagtaaggtaatcactgggttacatcctacacaggcacctacacacctcagtgttgacactaaattcaaaactgaaggtttatgtgttgacatacctggcatacctaaggacatgacctatagaagactcatctctatgatgggttttaaaatgaattatcaagttaatggttaccctaacatgtttatcacccgcgaagaagctataagacatgtacgtgcatggattggcttcgatgtcgaggggtgtcatgctactagagaagctgttggtaccaatttacctttacagctaggtttttctacaggtgttaacctagttgctgtacctacaggttatgttgatacacctaataatacagatttttccagagttagtgctaaaccaccgcctggagatcaatttaaacacctcataccacttatgtacaaaggacttccttggaatgtagtgcgtataaagattgtacaaatgttaagtgacacacttaaaaatctctctgacagagtcgtatttgtcttatgggcacatggctttgagttgacatctatgaagtattttgtgaaaataggacctgagcgcacctgttgtctatgtgatagacgtgccacatgcttttccactgcttcagacacttatgcctgttggcatcattctattggatttgattacgtctataatccgtttatgattgatgttcaacaatggggttttacaggtaacctacaaagcaaccatgatctgtattgtcaagtccatggtaatgcacatgtagctagttgtgatgcaatcatgactaggtgtctagctgtccacgagtgctttgttaagcgtgttgactggactattgaatatcctataattggtgatgaactgaagattaatgcggcttgtagaaaggttcaacacatggttgttaaagctgcattattagcagacaaattcccagttcttcacgacattggtaaccctaaagctattaagtgtgtacctcaagctgatgtagaatggaagttctatgatgcacagccttgtagtgacaaagcttataaaatagaagaattattctattcttatgccacacattctgacaaattcacagatggtgtatgcctattttggaattgcaatgtcgatagatatcctgctaattccattgtttgtagatttgacactagagtgctatctaaccttaacttgcctggttgtgatggtggcagtttgtatgtaaataaacatgcattccacacaccagcttttgataaaagtgcttttgttaatttaaaacaattaccatttttctattactctgacagtccatgtgagtctcatggaaaacaagtagtgtcagatatagattatgtaccactaaagtctgctacgtgtataacacgttgcaatttaggtggtgctgtctgtagacatcatgctaatgagtacagattgtatctcgatgcttataacatgatgatctcagctggctttagcttgtgggtttacaaacaatttgatacttataacctctggaacacttttacaagacttcagagtttagaaaatgtggcttttaatgttgtaaataagggacactttgatggacaacagggtgaagtaccagtttctatcattaataacactgtttacacaaaagttgatggtgttgatgtagaattgtttgaaaataaaacaacattacctgttaatgtagcatttgagctttgggctaagcgcaacattaaaccagtaccagaggtgaaaatactcaataatttgggtgtggacattgctgctaatactgtgatctgggactacaaaagagatgctccagcacatatatctactattggtgtttgttctatgactgacatagccaagaaaccaactgaaacgatttgtgcaccactcactgtcttttttgatggtagagttgatggtcaagtagacttatttagaaatgcccgtaatggtgttcttattacagaaggtagtgttaaaggtttacaaccatctgtaggtcccaaacaagctagtcttaatggagtcacattaattggagaagccgtaaaaacacagttcaattattataagaaagttgatggtgttgtccaacaattacctgaaacttactttactcagagtagaaatttacaagaatttaaacccaggagtcaaatggaaattgatttcttagaattagctatggatgaattcattgaacggtataaattagaaggctatgccttcgaacatatcgtttatggagattttagtcatagtcagttaggtggtttacatctactgattggactagctaaacgttttaaggaatcaccttttgaattagaagattttattcctatggacagtacagttaaaaactatttcataacagatgcgcaaacaggttcatctaagtgtgtgtgttctgttattgatttattacttgatgattttgttgaaataataaaatcccaagatttatctgtagtttctaaggttgtcaaagtgactattgactatacagaaatttcatttatgctttggtgtaaagatggccatgtagaaacattttacccaaaattacaatctagtcaagcgtggcaaccgggtgttgctatgcctaatctttacaaaatgcaaagaatgctattagaaaagtgtgaccttcaaaattatggtgatagtgcaacattacctaaaggcataatgatgaatgtcgcaaaatatactcaactgtgtcaatatttaaacacattaacattagctgtaccctataatatgagagttatacattttggtgctggttctgataaaggagttgcaccaggtacagctgttttaagacagtggttgcctacgggtacgctgcttgtcgattcagatcttaatgactttgtctctgatgcagattcaactttgattggtgattgtgcaactgtacatacagctaataaatgggatctcattattagtgatatgtacgaccctaagactaaaaatgttacaaaagaaaatgactctaaagagggttttttcacttacatttgtgggtttatacaacaaaagctagctcttggaggttccgtggctataaagataacagaacattcttggaatgctgatctttataagctcatgggacacttcgcatggtggacagcctttgttactaatgtgaatgcgtcatcatctgaagcatttttaattggatgtaattatcttggcaaaccacgcgaacaaatagatggttatgtcatgcatgcaaattacatattttggaggaatacaaatccaattcagttgtcttcctattctttatttgacatgagtaaatttccccttaaattaaggggtactgctgttatgtctttaaaagaaggtcaaatcaatgatatgattttatctcttcttagtaaaggtagacttataattagagaaaacaacagagttgttatttctagtgatgttcttgttaacaactaaacgaacaatgtttgtttttcttgttttattgccactagtctctagtcagtgtgttaatcttacaaccagaactcaattaccccctgcatacactaattctttcacacgtggtgtttattaccctgacaaagttttcagatcctcagttttacattcaactcaggacttgttcttacctttcttttccaatgttacttggttccatgctatacatgtctctgggaccaatggtactaagaggtttgataaccctgtcctaccatttaatgatggtgtttattttgcttccactgagaagtctaacataataagaggctggatttttggtactactttagattcgaagacccagtccctacttattgttaataacgctactaatgttgttattaaagtctgtgaatttcaattttgtaatgatccatttttgggtgtttattaccacaaaaacaacaaaagttggatggaaagtgagttcagagtttattctagtgcgaataattgcacttttgaatatgtctctcagccttttcttatggaccttgaaggaaaacagggtaatttcaaaaatcttagggaatttgtgtttaagaatattgatggttattttaaaatatattctaagcacacgcctattaatttagtgcgtgatctcccccagggtttttcggctttagaaccattggtagatttgccaataggtattaacatcactaggtttcaaactttacttgctttacatagaagttatttgactcctggtgattcttcttcaggttggacagctggtgctgcagcttattatgtgggttatcttcaacctaggacttttctattaaaatataatgaaaatggaaccattacagatgctgtagactgtgcacttgaccctctctcagaaacaaagtgtacgttgaaatccttcactgtagaaaaaggaatctatcaaacttctaactttagagtccaaccaacagaatctattgttagatttcctaatattacaaacttgtgcccttttggtgaagtttttaacgccaccagatttgcatctgtttatgcttggaacaggaagagaatcagcaactgtgttgctgattattctgtcctatataattccgcatcattttccacttttaagtgttatggagtgtctcctactaaattaaatgatctctgctttactaatgtctatgcagattcatttgtaattagaggtgatgaagtcagacaaatcgctccagggcaaactggaaagattgctgattataattataaattaccagatgattttacaggctgcgttatagcttggaattctaacaatcttgattctaaggttggtggtaattataattacctgtatagattgtttaggaagtctaatctcaaaccttttgagagagatatttcaactgaaatctatcaggccggtagcacaccttgtaatggtgttgaaggttttaattgttactttcctttacaatcatatggtttccaacccactaatggtgttggttaccaaccatacagagtagtagtactttcttttgaacttctacatgcaccagcaactgtttgtggacctaaaaagtctactaatttggttaaaaacaaatgtgtcaatttcaacttcaatggtttaacaggcacaggtgttcttactgagtctaacaaaaagtttctgcctttccaacaatttggcagagacattgctgacactactgatgctgtccgtgatccacagacacttgagattcttgacattacaccatgttcttttggtggtgtcagtgttataacaccaggaacaaatacttctaaccaggttgctgttctttatcaggatgttaactgcacagaagtccctgttgctattcatgcagatcaacttactcctacttggcgtgtttattctacaggttctaatgtttttcaaacacgtgcaggctgtttaataggggctgaacatgtcaacaactcatatgagtgtgacatacccattggtgcaggtatatgcgctagttatcagactcagactaattctcctcggcgggcacgtagtgtagctagtcaatccatcattgcctacactatgtcacttggtgcagaaaattcagttgcttactctaataactctattgccatacccacaaattttactattagtgttaccacagaaattctaccagtgtctatgaccaagacatcagtagattgtacaatgtacatttgtggtgattcaactgaatgcagcaatcttttgttgcaatatggcagtttttgtacacaattaaaccgtgctttaactggaatagctgttgaacaagacaaaaacacccaagaagtttttgcacaagtcaaacaaatttacaaaacaccaccaattaaagattttggtggttttaatttttcacaaatattaccagatccatcaaaaccaagcaagaggtcatttattgaagatctacttttcaacaaagtgacacttgcagatgctggcttcatcaaacaatatggtgattgccttggtgatattgctgctagagacctcatttgtgcacaaaagtttaacggccttactgttttgccacctttgctcacagatgaaatgattgctcaatacacttctgcactgttagcgggtacaatcacttctggttggacctttggtgcaggtgctgcattacaaataccatttgctatgcaaatggcttataggtttaatggtattggagttacacagaatgttctctatgagaaccaaaaattgattgccaaccaatttaatagtgctattggcaaaattcaagactcactttcttccacagcaagtgcacttggaaaacttcaagatgtggtcaaccaaaatgcacaagctttaaacacgcttgttaaacaacttagctccaattttggtgcaatttcaagtgttttaaatgatatcctttcacgtcttgacaaagttgaggctgaagtgcaaattgataggttgatcacaggcagacttcaaagtttgcagacatatgtgactcaacaattaattagagctgcagaaatcagagcttctgctaatcttgctgctactaaaatgtcagagtgtgtacttggacaatcaaaaagagttgatttttgtggaaagggctatcatcttatgtccttccctcagtcagcacctcatggtgtagtcttcttgcatgtgacttatgtccctgcacaagaaaagaacttcacaactgctcctgccatttgtcatgatggaaaagcacactttcctcgtgaaggtgtctttgtttcaaatggcacacactggtttgtaacacaaaggaatttttatgaaccacaaatcattactacagacaacacatttgtgtctggtaactgtgatgttgtaataggaattgtcaacaacacagtttatgatcctttgcaacctgaattagactcattcaaggaggagttagataaatattttaagaatcatacatcaccagatgttgatttaggtgacatctctggcattaatgcttcagttgtaaacattcaaaaagaaattgaccgcctcaatgaggttgccaagaatttaaatgaatctctcatcgatctccaagaacttggaaagtatgagcagtatataaaatggccatggtacatttggctaggttttatagctggcttgattgccatagtaatggtgacaattatgctttgctgtatgaccagttgctgtagttgtctcaagggctgttgttcttgtggatcctgctgcaaatttgatgaagacgactctgagccagtgctcaaaggagtcaaattacattacacataaacgaacttatggatttgtttatgagaatcttcacaattggaactgtaactttgaagcaaggtgaaatcaaggatgctactccttcagattttgttcgcgctactgcaacgataccgatacaagcctcactccctttcggatggcttattgttggcgttgcacttcttgctgtttttcagagcgcttccaaaatcataaccctcaaaaagagatggcaactagcactctccaagggtgttcactttgtttgcaacttgctgttgttgtttgtaacagtttactcacaccttttgctcgttgctgctggccttgaagccccttttctctatctttatgctttagtctacttcttgcagagtataaactttgtaagaataataatgaggctttggctttgctggaaatgccgttccaaaaacccattactttatgatgccaactattttctttgctggcatactaattgttacgactattgtataccttacaatagtgtaacttcttcaattgtcattacttcaggtgatggcacaacaagtcctatttctgaacatgactaccagattggtggttatactgaaaaatgggaatctggagtaaaagactgtgttgtattacacagttacttcacttcagactattaccagctgtactcaactcaattgagtacagacactggtgttgaacatgttaccttcttcatctacaataaaattgttgatgagcctgaagaacatgtccaaattcacacaatcgacggttcatccggagttgttaatccagtaatggaaccaatttatgatgaaccgacgacgactactagcgtgcctttgtaagcacaagctgatgagtacgaacttatgtactcattcgtttcggaagagacaggtacgttaatagttaatagcgtacttctttttcttgctttcgtggtattcttgctagttacactagccatccttactgcgcttcgattgtgtgcgtactgctgcaatattgttaacgtgagtcttgtaaaaccttctttttacgtttactctcgtgttaaaaatctgaattcttctagagttcctgatcttctggtctaaacgaactaaatattatattagtttttctgtttggaactttaattttagccatggcagattccaacggtactattaccgttgaagagcttaaaaagctccttgaacaatggaacctagtaataggtttcctattccttacatggatttgtcttctacaatttgcctatgccaacaggaataggtttttgtatataattaagttaattttcctctggctgttatggccagtaactttagcttgttttgtgcttgctgctgtttacagaataaattggatcaccggtggaattgctatcgcaatggcttgtcttgtaggcttgatgtggctcagctacttcattgcttctttcagactgtttgcgcgtacgcgatccatgtggtcattcaatccagaaactaacattcttctcaacgtgccactccatggcactattctgaccagaccgcttctagaaagtgaactcgtaatcggagctgtgatccttcgtggacatcttcgtattgctggacaccatctaggacgctgtgacatcaaggacctgcctaaagaaatcactgttgctacatcacgaacgctttcttattacaaattgggagcttcgcagcgtgtagcaggtgactcaggttttgctgcatacagtcgctacaggattggcaactataaattaaacacagaccattccagtagcagtgacaatattgctttgcttgtacagtaagtgacaacagatgtttcatctcgttgactttcaggttactatagcagagatattactaattattatgaggacttttaaagtttccatttggaatcttgattacatcataaacctcataattaaaaatttatctaagtcactaactgagaataaatattctcaattagatgaagagcaaccaatggagattgattaaacgaacatgaaaattattcttttcttggcactgataacactcgctacttgtgagctttatcactaccaagagtgtgttagaggtacaacagtacttttaaaagaaccttgctcttctggaacatacgagggcaattcaccatttcatcctctagctgataacaaatttgcactgacttgctttagcactcaatttgcttttgcttgtcctgacggcgtaaaacacgtctatcagttacgtgccagatcagtttcacctaaactgttcatcagacaagaggaagttcaagaactttactctccaatttttcttattgttgcggcaatagtgtttataacactttgcttcacactcaaaagaaagacagaatgattgaactttcattaattgacttctatttgtgctttttagcctttctgctattccttgttttaattatgcttattatcttttggttctcacttgaactgcaagatcataatgaaacttgtcacgcctaaacgaacatgaaatttcttgttttcttaggaatcatcacaactgtagctgcatttcaccaagaatgtagtttacagtcatgtactcaacatcaaccatatgtagttgatgacccgtgtcctattcacttctattctaaatggtatattagagtaggagctagaaaatcagcacctttaattgaattgtgcgtggatgaggctggttctaaatcacccattcagtacatcgatatcggtaattatacagtttcctgtttaccttttacaattaattgccaggaacctaaattgggtagtcttgtagtgcgttgttcgttctatgaagactttttagagtatcatgacgttcgtgttgttttagatttcatctaaacgaacaaactaaaatgtctgataatggaccccaaaatcagcgaaatgcaccccgcattacgtttggtggaccctcagattcaactggcagtaaccagaatggagaacgcagtggggcgcgatcaaaacaacgtcggccccaaggtttacccaataatactgcgtcttggttcaccgctctcactcaacatggcaaggaagaccttaaattccctcgaggacaaggcgttccaattaacaccaatagcagtccagatgaccaaattggctactaccgaagagctaccagacgaattcgtggtggtgacggtaaaatgaaagatctcagtccaagatggtatttctactacctaggaactgggccagaagctggacttccctatggtgctaacaaagacggcatcatatgggttgcaactgagggagccttgaatacaccaaaagatcacattggcacccgcaatcctgctaacaatgctgcaatcgtgctacaacttcctcaaggaacaacattgccaaaaggcttctacgcagaagggagcagaggcggcagtcaagcctcttctcgttcctcatcacgtagtcgcaacagttcaagaaattcaactccaggcagcagtaggggaacttctcctgctagaatggctggcaatggcggtgatgctgctcttgctttgctgctgcttgacagattgaaccagcttgagagcaaaatgtctggtaaaggccaacaacaacaaggccaaactgtcactaagaaatctgctgctgaggcttctaagaagcctcggcaaaaacgtactgccactaaagcatacaatgtaacacaagctttcggcagacgtggtccagaacaaacccaaggaaattttggggaccaggaactaatcagacaaggaactgattacaaacattggccgcaaattgcacaatttgcccccagcgcttcagcgttcttcggaatgtcgcgcattggcatggaagtcacaccttcgggaacgtggttgacctacacaggtgccatcaaattggatgacaaagatccaaatttcaaagatcaagtcattttgctgaataagcatattgacgcatacaaaacattcccaccaacagagcctaaaaaggacaaaaagaagaaggctgatgaaactcaagccttaccgcagagacagaagaaacagcaaactgtgactcttcttcctgctgcagatttggatgatttctccaaacaattgcaacaatccatgagcagtgctgactcaactcaggcctaaactcatgcagaccacacaaggcagatgggctatataaacgttttcgcttttccgtttacgatatatagtctactcttgtgcagaatgaattctcgtaactacatagcacaagtagatgtagttaactttaatctcacatagcaatctttaatcagtgtgtaacattagggaggacttgaaagagccaccacattttcaccgaggccacgcggagtacgatcgagtgtacagtgaacaatgctagggagagctgcctatatggaagagccctaatgtgtaaaattaattttagtagtgctatccccatgtgattttaatagcttcttaggagaatgacaaaaaaaaaaaaaaaaaaaaaaaaaaaaaaaaaaaaaaaaaaaaaaaaaaaaaaaaaaagggtcggcatggcatctccacctcctcgcggtccgacctgggcatccgaaggaggacgcacgtccactcggatggctaagggagcagcacactggcggccgttactagggccgcgcccttcccaacagttgcgcagcctgaatggcgaatggagatccaatttttaagtgtataatgtgttaaactactgattctaattgtttgtgtattttagattcacagtcccaaggctcatttcaggcccctcagtcctcacagtctgttcatgatcataatcagccataccacatttgtagaggttttacttgctttaaaaaacctcccacacctccccctgaacctgaaacataaaatgaatgcaattgttgttgttaacttgtttattgcagcttataatggttacaaataaagcaatagcatcacaaatttcacaaataaagcatttttttcactgcattctagttgtggtttgtccaaactcatcaatgtatcttaaagcttgagtattctatagtctcacctaaatagcttggcgtaatcatggtcatagctgtttcctgtgtgaaattgttatccgctcacaattccacacaacatacgagccggaagcataaagtgtaaagcctggggtgcctaatgagtgagctaactcacattaattgcgttgcgctcactgcccgctttccagtcgggaaacctgtcgtgccagctgcattaatgaatcggccaacgcgaaccccttgcggccgcccgggccgtcgaccaattctcatgtttgacagcttatcatcgaatttctgccattcatccgcttattatcacttattcaggcgtagcaaccaggcgtttaagggcaccaataactgccttaaaaaaattacgccccgccctgccactcatcgcagtactgttgtaattcattaagcattctgccgacatggaagccatcacaaacggcatgatgaacctgaatcgccagcggcatcagcaccttgtcgccttgcgtataatatttgcccatggtgaaaacgggggcgaagaagttgtccatattggccacgtttaaatcaaaactggtgaaactcacccagggattggctgagacgaaaaacatattctcaataaaccctttagggaaataggccaggttttcaccgtaacacgccacatcttgcgaatatatgtgtagaaactgccggaaatcgtcgtggtattcactccagagcgatgaaaacgtttcagtttgctcatggaaaacggtgtaacaagggtgaacactatcccatatcaccagctcaccgtctttcattgccatacgaaattccggatgagcattcatcaggcgggcaagaatgtgaataaaggccggataaaacttgtgcttatttttctttacggtctttaaaaaggccgtaatatccagctgaacggtctggttataggtacattgagcaactgactgaaatgcctcaaaatgttctttacgatgccattgggatatatcaacggtggtatatccagtgatttttttctccattttagcttccttagctcctgaaaatctcgataactcaaaaaatacgcccggtagtgatcttatttcattatggtgaaagttggaacctcttacgtgccgatcaacgtctcattttcgccaaaagttggcccagggcttcccggtatcaacagggacaccaggatttatttattctgcgaagtgatcttccgtcacaggtatttattcgcgataagctcatggagcggcgtaaccgtcgcacaggaaggacagagaaagcgcggatctgggaagtgacggacagaacggtcaggacctggattggggaggcggttgccgccgctgctgctgacggtgtgacgttctctgttccggtcacaccacatacgttccgccattcctatgcgatgcacatgctgtatgccggtataccgctgaaagttctgcaaagcctgatgggacataagtccatcagttcaacggaagtctacacgaaggtttttgcgctggatgtggctgcccggcaccgggtgcagtttgcgatgccggagtctgatgcggttgcgatgctgaaacaattatcctgagaataaatgccttggcctttatatggaaatgtggaactgagtggatatgctgtttttgtctgttaaacagagaagctggctgttatccactgagaagcgaacgaaacagtcgggaaaatctcccattatcgtagagatccgcattattaatctcaggagcctgtgtagcgtttataggaagtagtgttctgtcatgatgcctgcaagcggtaacgaaaacgatttgaatatgccttcaggaacaatagaaatcttcgtgcggtgttacgttgaagtggagcggattatgtcagcaatggacagaacaacctaatgaacacagaaccatgatgtggtctgtccttttacagccagtagtgctcgccgcagtcgagcgacagggcgaagccctcggctggttgccctcgccgctgggctggcggccgtctatggccctgcaaacgcgccagaaacgccgtcgaagccgtgtgcgagacaccgcggccggccgccggcgttgtggatacctcgcggaaaacttggccctcactgacagatgaggggcggacgttgacacttgaggggccgactcacccggcgcggcgttgacagatgaggggcaggctcgatttcggccggcgacgtggagctggccagcctcgcaaatcggcgaaaacgcctgattttacgcgagtttcccacagatgatgtggacaagcctggggataagtgccctgcggtattgacacttgaggggcgcgactactgacagatgaggggcgcgatccttgacacttgaggggcagagtgctgacagatgaggggcgcacctattgacatttgaggggctgtccacaggcagaaaatccagcatttgcaagggtttccgcccgtttttcggccaccgctaacctgtcttttaacctgcttttaaaccaatatttataaaccttgtttttaaccagggctgcgccctgtgcgcgtgaccgcgcacgccgaaggggggtgcccccccttctcgaaccctcccggtcgagtgagcgaggaagcaccagggaacagcacttatatattctgcttacacacgatgcctgaaaaaacttcccttggggttatccacttatccacggggatatttttataattattttttttatagtttttagatcttcttttttagagcgccttgtaggcctttatccatgctggttctagagaaggtgttgtgacaaattgccctttcagtgtgacaaatcaccctcaaatgacagtcctgtctgtgacaaattgcccttaaccctgtgacaaattgccctcagaagaagctgttttttcacaaagttatccctgcttattgactcttttttatttagtgtgacaatctaaaaacttgtcacacttcacatggatctgtcatggcggaaacagcggttatcaatcacaagaaacgtaaaaatagcccgcgaatcgtccagtcaaacgacctcactgaggcggcatatagtctctcccgggatcaaaaacgtatgctgtatctgttcgttgaccagatcagaaaatctgatggcaccctacaggaacatgacggtatctgcgagatccatgttgctaaatatgctgaaatattcggattgacctctgcggaagccagtaaggatatacggcaggcattgaagagtttcgcggggaaggaagtggttttttatcgccctgaagaggatgccggcgatgaaaaaggctatgaatcttttccttggtttatcaaacgtgcgcacagtccatccagagggctttacagtgtacatatcaacccatatctcattcccttctttatcgggttacagaaccggtttacgcagtttcggcttagtgaaacaaaagaaatcaccaatccgtatgccatgcgtttatacgaatccctgtgtcagtatcgtaagccggatggctcaggcatcgtctctctgaaaatcgactggatcatagagcgttaccagctgcctcaaagttaccagcgtatgcctgacttccgccgccgcttcctgcaggtctgtgttaatgagatcaacagcagaactccaatgcgcctctcatacattgagaaaaagaaaggccgccagacgactcatatcgtattttccttccgcgatatcacttccatgacgacaggatagtctgagggttatctgtcacagatttgagggtggttcgtcacatttgttctgacctactgagggtaatttgtcacagttttgctgtttccttcagcctgcatggattttctcatactttttgaactgtaatttttaaggaagccaaatttgagggcagtttgtcacagttgatttccttctctttcccttcgtcatgtgacctgatatcgggggttagttcgtcatcattgatgagggttgattatcacagtttattactctgaattggctatccgcgtgtgtacctctacctggagtttttcccacggtggatatttcttcttgcgctgagcgtaagagctatctgacagaacagttcttctttgcttcctcgccagttcgctcgctatgctcggttacacggctgcggcg

SEQ ID NO: 8 - DNA, 35283 bp, Artificial Sequence
  Clone pCCI-4K-SARS-CoV-2-DDWWW. Based on SARS-CoV-2.
gatgtgctgcaaggcgattaagttgggtaacgccagggttttcccagtcacgacgttgtaaaacgacggccagtgaattgtaatacgactcactatagggcgaattctagttattaatagtaatcaattacggggtcattagttcatagcccatatatggagttccgcgttacataacttacggtaaatggcccgcctggctgaccgcccaacgacccccgcccattgacgtcaataatgacgtatgttcccatagtaacgccaatagggactttccattgacgtcaatgggtggagtatttacggtaaactgcccacttggcagtacatcaagtgtatcatatgccaagtacgccccctattgacgtcaatgacggtaaatggcccgcctggcattatgcccagtacatgaccttatgggactttcctacttggcagtacatctacgtattagtcatcgctattaccatggtgatgcggttttggcagtacatcaatgggcgtggatagcggtttgactcacggggatttccaagtctccaccccattgacgtcaatgggagtttgttttggcaccaaaatcaacgggactttccaaaatgtcgtaacaactccgccccattgacgcaaatgggcggtaggcgtgtacggtgggaggtctatataagcagagctggtttagtgaaccgtattaaaggtttataccttcccaggtaacaaaccaaccaactttcgatctcttgtagatctgttctctaaacgaactttaaaatctgtgtggctgtcactcggctgcatgcttagtgcactcacgcagtataattaataactaattactgtcgttgacaggacacgagtaactcgtctatcttctgcaggctgcttacggtttcgtccgtgttgcagccgatcatcagcacatctaggtttcgtccgggtgtgaccgaaaggtaagatggagagccttgtccctggtttcaacgagaaaacacacgtccaactcagtttgcctgttttacaggttcgcgacgtgctcgtacgtggctttggagactccgtggaggaggtcttatcagaggcacgtcaacatcttaaagatggcacttgtggcttagtagaagttgaaaaaggcgttttgcctcaacttgaacagccctatgtgttcatcaaacgttcggatgctcgaactgcacctcatggtcatgttatggttgagctggtagcagaactcgaaggcattcagtacggtcgtagtggtgagacacttggtgtccttgtccctcatgtgggcgaaataccagtggcttaccgcaaggttcttcttcgtaagaacggtaataaaggagctggtggccatagttacggcgccgatctaaagtcatttgacttaggcgacgagcttggcactgatccttatgaagattttcaagaaaactggaacactaaacatagcagtggtgttacccgtgaactcatgcgtgagcttaacggaggggcatacactcgctatgtcgataacaacttctgtggccctgatggctaccctcttgagtgcattaaagaccttctagcacgtgctggtaaagcttcatgcactttgtccgaacaactggactttattgacactaagaggggtgtatactgctgccgtgaacatgagcatgaaattgcttggtacacggaacgttctgaaaagagctatgaattgcagacaccttttgaaattaaattggcaaagaaatttgacaccttcaatggggaatgtccaaattttgtatttcccttaaattccataatcaagactattcaaccaagggttgaaaagaaaaagcttgatggctttatgggtagaattcgatctgtctatccagttgcgtcaccaaatgaatgcaaccaaatgtgcctttcaactctcatgaagtgtgatcattgtggtgaaacttcatggcagacgggcgattttgttaaagccacttgcgaattttgtggcactgagaatttgactaaagaaggtgccactacttgtggttacttaccccaaaatgctgttgttaaaatttattgtccagcatgtcacaattcagaagtaggacctgagcatagtcttgccgaataccataatgaatctggcttgaaaaccattcttcgtaagggtggtcgcactattgcctttggaggctgtgtgttctcttatgttggttgccataacaagtgtgcctattgggtcccgcgtgcgagtgcgaacataggttgtaatcatacgggtgtagtaggtgaaggttcggaaggtctaaatgataatctactagaaatactacaaaaagaaaaagtaaatataaatatagtaggtgattttaaactaaatgaagaaatagcgataatattagcgtcgttttcggcgtcgacgagtgcgtttgtagaaacggtaaaaggtttagattataaagcgtttaaacaaatagtagaatcgtgtggtaattttaaagtgacgaaaggtaaagcgaaaaaaggtgcgtggaatataggtgaacaaaaatcgatactaagtccgctatatgcgtttgcgtcggaagcggcgcgtgtagtacgttcgatattttcgcgtacgctagaaacggcgcaaaattcggtacgtgtattacaaaaagcggcgataacgatactagatggtatatcgcaatattcgctacgtctaatagatgcgatgatgtttacgtcggatttagcgacgaataatctagtagtaatggcgtatataacgggtggtgtagtacaattaacgtcgcaatggctaacgaatatatttggtacggtatatgaaaaactaaaaccggtactagattggctagaagaaaaatttaaagaaggtgtagaatttctacgtgatggttgggaaatagtaaaatttatatcgacgtgtgcgtgtgaaatagtaggtggtcaaatagtaacgtgtgcgaaagaaataaaagaatcggtacaaacgttttttaaactagtaaataaatttctagcgctatgtgcggattcgataataataggtggtgcgaaactaaaagcgctaaatctaggtgaaacgtttgtgacgcattcgaaaggtttatatcgtaaatgtgtaaaatcgcgtgaagaaacgggtctactaatgccgctaaaagcgccgaaagaaataatatttttagaaggtgaaacgctaccgacggaagtattaacggaagaagtagtattaaaaacgggtgatttacaaccgttagaacaaccgacgtcggaagcggtagaagcgccgttagtaggtacgccggtatgtataaatggtctaatgttactagaaataaaagatacggaaaaatattgtgcgctagcgccgaatatgatggtaacgaataatacgtttacgctaaaaggtggtgcgccgacgaaagtaacgtttggtgatgatacggtaatagaagtacaaggttataaatcggtaaatataacgtttgaactagatgaacgtatagataaagtactaaatgaaaaatgttcggcgtatacggtagaactaggtacggaagtaaatgaatttgcgtgtgtagtagcggatgcggtaataaaaacgttacaaccggtatcggaattactaacgccgctaggtatagatttagatgaatggtcgatggcgacgtattatttatttgatgaatcgggtgaatttaaattagcgtcgcatatgtattgttcgttttatccgccggatgaagatgaagaagaaggtgattgtgaagaagaagaatttgaaccgtcgacgcaatatgaatatggtacggaagatgattatcaaggtaaaccgttagaatttggtgcgacgtcggcggcgctacaaccggaagaagaacaagaagaagattggttggatgatgattcgcaacaaacggtaggtcaacaagatggttcggaagataatcaaacgacgacgatacaaacgatagtagaagtacaaccgcaattagaaatggaactaacgccggtagtacaaacgatagaagtaaattcgttttcgggttatttaaaactaacggataatgtatatataaaaaatgcggatatagtagaagaagcgaaaaaagtaaaaccgacggtagtagtaaatgcggcgaatgtatatctaaaacatggtggtggtgtagcgggtgcgttaaataaagcgacgaataatgcgatgcaagtagaatcggatgattatatagcgacgaatggtccgctaaaagtaggtggttcgtgtgtattatcgggtcataatctagcgaaacattgtctacatgtagtaggtccgaatgtaaataaaggtgaagatatacaactactaaaatcggcgtatgaaaattttaatcaacatgaagtactactagcgccgttattatcggcgggtatatttggtgcggacccgatacattcgttacgtgtgtgtgtagatacggtacgcacgaatgtatatttagcggtatttgataaaaatctatatgataaactagtatcgtcgtttttagaaatgaaatcggaaaaacaagtagaacaaaaaatagcggaaataccgaaagaagaagtaaaaccgtttataacggaatcgaaaccgtcggtagaacaacgtaaacaagatgataaaaaaataaaagcgtgtgtagaagaagtaacgacgacgctagaagaaacgaaatttctaacagaaaatttattactatatatagatataaatggtaatctacatccggattcggcgacgctagtatcggatatagatataacgtttttaaaaaaagatgcgccgtatatagtaggtgatgtagtacaagaaggtgtattaacggcggtagtaataccgacgaaaaaagcgggtggtacgacggaaatgctggcgaaagcgttacgtaaagtaccgacggataattatataacgacgtacccgggtcaaggtttaaatggttatacggtagaagaagcgaaaacggtactaaaaaaatgtaaatcggcgttttatatactaccgtcgataatatcgaatgaaaaacaagaaatactaggtacggtatcgtggaatttacgtgaaatgctagcgcatgcggaagaaacacgtaaattaatgccggtatgtgtagaaacgaaagcgatagtatcgacgatacaacgtaaatataaaggtataaaaatacaagaaggtgtagtagattatggtgcgcgtttttatttttatacgtcgaaaacgacggtagcgtcgctaataaatacgctaaatgatctaaatgaaacgctagtaacgatgccgctaggttatgtaacgcatggtttaaatttagaagaagcggcgcgttatatgcgttcgctaaaagtaccggcgacggtatcggtatcgtcgccggatgcggtaacggcgtataatggttatctaacgtcgtcgtcgaaaacgccggaagaacattttatagaaacgatatcgctagcgggttcgtataaagattggtcgtattcgggtcaatcgacgcaactaggtatagaatttctaaaacgtggtgataaatcggtatattatacgtcgaatccgacgacgtttcatctagatggtgaagtaataacgtttgataatctaaaaacgctactatcgttacgtgaagtacgtacgataaaagtatttacgacggtagataatataaatctacatacgcaagtagtagatatgtcgatgacatatggacaacaatttggtccgacgtatttagatggtgcggatgttacgaaaataaaaccgcataattcgcatgaaggtaaaacgttttatgtattaccgaatgatgatacgctacgtgtagaagcgtttgaatattatcatacgactgatccgtcgtttctaggtcgttatatgtcggcgttaaatcatacgaaaaaatggaaatatccgcaagtaaatggtttaacgtcgataaaatgggcggataataattgttatctagcgacggcgttattaacgctacaacaaatagaattaaaatttaatccgccggcgctacaagatgcgtattatcgtgcgcgtgcgggtgaagcggcgaatttttgtgcgctaatattagcgtattgtaataaaacggtaggtgaattaggtgatgtacgtgaaacgatgtcgtatttatttcaacatgcgaatttagattcgtgtaaacgtgtattaaatgtagtatgtaaaacgtgtggtcaacaacaaacgacgctaaaaggtgtagaagcggtaatgtatatgggtacgctatcgtatgaacaatttaaaaaaggtgtacaaataccgtgtacgtgtggtaaacaagcgacgaaatatctagtacaacaagaatcgccgtttgtaatgatgtcggcgccgccggcgcaatatgaactaaaacatggtacgtttacgtgtgcgtcggaatatacgggtaattatcaatgtggtcattataaacatataacgtcgaaagaaacgttatattgtatagatggtgcgttacttacgaaatcgtcggaatataaaggtccgataacggatgtattttataaagaaaattcgtatacgacgacgataaaaccggtaacgtataaattagatggtgtagtatgtacggaaatagatccgaaattagataattattataaaaaagataattcgtattttacggaacaaccgatagatctagtaccgaatcaaccatatccgaatgcgtcgtttgataattttaaatttgtatgtgataatataaaatttgcggatgatttaaatcaattaacgggttataaaaaaccggcgtcgcgtgaactaaaagtaacgttttttccggatttaaatggtgatgtagtagcgatagattataaacattatacgccgtcgtttaaaaaaggtgcgaaattattacataaaccgatagtatggcatgtaaataatgcgacgaataaagcgacgtataaaccgaatacgtggtgtatacggtgtctatggagcacgaaaccggtagaaacgtcgaattcgtttgatgtactaaaatcggaagatgcgcaaggtatggataatctagcgtgtgaagatctaaaaccggtatcggaagaagtagtagaaaatccgacgatacaaaaagatgtactggaatgtaatgtaaaaacgacggaagtagtaggtgatataatactaaaaccggctaataattcgttaaaaataacggaagaagtaggtcatacggatctaatggcggcgtatgtagataattcgtcgctaacgataaaaaaaccgaatgaattatcgcgtgtattaggtttaaaaacgctagcgacgcatggtttagctgctgtaaattcggtaccgtgggatacgatagcgaattatgcgaaaccgtttctaaataaagtagtatcgacgacgacgaatatagtaacgcgatgtttaaatcgtgtatgtacgaattatatgccgtatttttttacgttattactacaattatgtacgtttacgcgatcgacgaattcgcgtataaaagcgtcgatgccgacgacgatagcgaaaaatacggtaaaatcggtaggtaaattttgtctagaagcgtcgtttaattatttaaaatcgccgaatttttctaaactaataaatataataatatggtttttactattatcggtatgcctaggttctttaatctactcaaccgctgctttaggtgttttaatgtctaatttaggcatgccttcttactgtactggttacagagaaggctatttgaactctactaatgtcactattgcaacctactgtactggttctataccttgtagtgtttgtcttagtggtttagattctttagacacctatccttctttagaaactatacaaattaccatttcatcttttaaatgggatttaactgcttttggcttagttgcagagtggtttttggcatatattcttttcactaggtttttctatgtacttggattggctgcaatcatgcaattgtttttcagctattttgcagtacattttattagtaattcttggcttatgtggttaataattaatcttgtacaaatggccccgatttcagctatggttagaatgtacatcttctttgcatcattttattatgtatggaaaagttatgtgcatgttgtagacggttgtaattcatcaacttgtatgatgtgttacaaacgtaatagagcaacaagagtcgaatgtacaactattgttaatggtgttagaaggtccttttatgtctatgctaatggaggtaaaggcttttgcaaactacacaattggaattgtgttaattgtgatacattctgtgctggtagtacatttattagtgatgaagttgcgagagacttgtcactacagtttaaaagaccaataaatcctactgaccagtcttcttacatcgttgatagtgttacagtgaagaatggttccatccatctttactttgataaagctggtcaaaagacttatgaaagacattctctctctcattttgttaacttagacaacctgagagctaataacactaaaggttcattgcctattaatgttatagtttttgatggtaaatcaaaatgtgaagaatcatctgcaaaatcagcgtctgtttactacagtcagcttatgtgtcaacctatactgttactagatcaggcattagtgtctgatgttggtgatagtgcggaagttgcagttaaaatgtttgatgcttacgttaatacgttttcatcaacttttaacgtaccaatggaaaaactcaaaacactagttgcaactgcagaagctgaacttgcaaagaatgtgtccttagacaatgtcttatctacttttatttcagcagctcggcaagggtttgttgattcagatgtagaaactaaagatgttgttgaatgtcttaaattgtcacatcaatctgacatagaagttactggcgatagttgtaataactatatgctcacctataacaaagttgaaaacatgacaccccgtgaccttggtgcttgtattgactgtagtgcgcgtcatattaatgcgcaggtagcaaaaagtcacaacattgctttgatatggaacgttaaagatttcatgtcattgtctgaacaactacgaaaacaaatacgtagtgctgctaaaaagaataacttaccttttaagttgacatgtgcaactactagacaagttgttaatgttgtaacaacaaagatagcacttaagggtggtaaaattgttaataattggttgaagcagttaattaaagttacacttgtgttcctttttgttgctgctattttctatttaataacacctgttcatgtcatgtctaaacatactgacttttcaagtgaaatcataggatacaaggctattgatggtggtgtcactcgtgacatagcatctacagatacttgttttgctaacaaacatgctgattttgacacatggtttagccagcgtggtggtagttatactaatgacaaagcttgcccattgattgctgcagtcataacaagagaagtgggttttgtcgtgcctggtttgcctggcacgatattacgcacaactaatggtgactttttgcatttcttacctagagtttttagtgcagttggtaacatctgttacacaccatcaaaacttatagagtacactgactttgcaacatcagcttgtgttttggctgctgaatgtacaatttttaaagatgcttctggtaagccagtaccatattgttatgataccaatgtactagaaggttctgttgcttatgaaagtttacgccctgacacacgttatgtgctcatggatggctctattattcaatttcctaacacctaccttgaaggttctgttagagtggtaacaacttttgattctgagtactgtaggcacggcacttgtgaaagatcagaagctggtgtttgtgtatctactagtggtagatgggtacttaacaatgattattacagatctttaccaggagttttctgtggtgtagatgctgtaaatttacttactaatatgtttacaccactaattcaacctattggtgctttggacatatcagcatctatagtagctggtggtattgtagctatcgtagtaacatgccttgcctactattttatgaggtttagaagagcttttggtgaatacagtcatgtagttgcctttaatactttactattccttatgtcattcactgtactctgtttaacaccagtttactcattcttacctggtgtttattctgttatttacttgtacttgacattttatcttactaatgatgtttcttttttagcacatattcagtggatggttatgttcacacctttagtacctttctggataacaattgcttatatcatttgtatttccacaaagcatttctattggttctttagtaattacctaaagagacgtgtagtctttaatggtgtttcctttagtacttttgaagaagctgcgctgtgcacctttttgttaaataaagaaatgtatctaaagttgcgtagtgatgtgctattacctcttacgcaatataatagatacttagctctttataataagtacaagtattttagtggagcaatggatacaactagctacagagaagctgcttgttgtcatctcgcaaaggctctcaatgacttcagtaactcaggttctgatgttctttaccaaccaccacaaacctctatcacctcagctgttttgcagagtggttttagaaaaatggcattcccatctggtaaagttgagggttgtatggtacaagtaacttgtggtacaactacacttaacggtctttggcttgatgacgtagtttactgtccaagacatgtgatctgcacctctgaagacatgcttaaccctaattatgaagatttactcattcgtaagtctaatcataatttcttggtacaggctggtaatgttcaactcagggttattggacattctatgcaaaattgtgtacttaagcttaaggttgatacagccaatcctaagacacctaagtataagtttgttcgcattcaaccaggacagactttttcagtgttagcttgttacaatggttcaccatctggtgtttaccaatgtgctatgaggcccaatttcactattaagggttcattccttaatggttcatgtggtagtgttggttttaacatagattatgactgtgtctctttttgttacatgcaccatatggaattaccaactggagttcatgctggcacagacttagaaggtaacttttatggaccttttgttgacaggcaaacagcacaagcagctggtacggacacaactattacagttaatgttttagcttggttgtacgctgctgttataaatggagacaggtggtttctcaatcgatttaccacaactcttaatgactttaaccttgtggctatgaagtacaattatgaacctctaacacaagaccatgttgacatactaggacctctttctgctcaaactggaattgccgttttagatatgtgtgcttcattaaaagaattactgcaaaatggtatgaatggacgtaccatattgggtagtgctttattagaagatgaatttacaccttttgatgttgttagacaatgctcaggtgttactttccaaagtgcagtgaaaagaacaatcaagggtacacaccactggttgttactcacaattttgacttcacttttagttttagtccagagtactcaatggtctttgttcttttttttgtatgaaaatgcctttttaccttttgctatgggtattattgctatgtctgcttttgcaatgatgtttgtcaaacataagcatgcatttctctgtttgtttttgttaccttctcttgccactgtagcttattttaatatggtctatatgcctgctagttgggtgatgcgtattatgacatggttggatatggttgatactagtttgtctggttttaagctaaaagactgtgttatgtatgcatcagctgtagtgttactaatccttatgacagcaagaactgtgtatgatgatggtgctaggagagtgtggacacttatgaatgtcttgacactcgtttataaagtttattatggtaatgctttagatcaagccatttccatgtgggctcttataatctctgttacttctaactactcaggtgtagttacaactgtcatgtttttggccagaggtattgtttttatgtgtgttgagtattgccctattttcttcataactggtaatacacttcagtgtataatgctagtttattgtttcttaggctatttttgtacttgttactttggcctcttttgtttactcaaccgctactttagactgactcttggtgtttatgattacttagtttctacacaggagtttagatatatgaattcacagggactactcccacccaagaatagcatagatgccttcaaactcaacattaaattgttgggtgttggtggcaaaccttgtatcaaagtagccactgtacagtctaaaatgtcagatgtaaagtgcacatcagtagtcttactctcagttttgcaacaactcagagtagaatcatcatctaaattgtgggctcaatgtgtccagttacacaatgacattctcttagctaaagatactactgaagcctttgaaaaaatggtttcactactttctgttttgctttccatgcagggtgctgtagacataaacaagctttgtgaagaaatgctggacaacagggcaaccttacaagctatagcctcagagtttagttcccttccatcatatgcagcttttgctactgctcaagaagcttatgagcaggctgttgctaatggtgattctgaagttgttcttaaaaagttgaagaagtctttgaatgtggctaaatctgaatttgaccgtgatgcagccatgcaacgtaagttggaaaagatggctgatcaagctatgacccaaatgtataaacaggctagatctgaggacaagagggcaaaagttactagtgctatgcagacaatgcttttcactatgcttagaaagttggataatgatgcactcaacaacattatcaacaatgcaagagatggttgtgttcccttgaacataatacctcttacaacagcagccaaactaatggttgtcataccagactataacacatataaaaatacgtgtgatggtacaacatttacttatgcatcagcattgtgggaaatccaacaggttgtagatgcagatagtaaaattgttcaacttagtgaaattagtatggacaattcacctaatttagcatggcctcttattgtaacagctttaagggccaattctgctgtcaaattacagaataatgagcttagtcctgttgcactacgacagatgtcttgtgctgccggtactacacaaactgcttgcactgatgacaatgcgttagcttactacaacacaacaaagggaggtaggtttgtacttgcactgttatccgatttacaggatttgaaatgggctagattccctaagagtgatggaactggtactatctatacagaactggaaccaccttgtaggtttgttacagacacacctaaaggtcctaaagtgaagtatttatactttattaaaggattaaacaacctaaatagaggtatggtacttggtagtttagctgccacagtacgtctacaagctggtaatgcaacagaagtgcctgccaattcaactgtattatctttctgtgcttttgctgtagatgctgctaaagcttacaaagattatctagctagtgggggacaaccaatcactaattgtgttaagatgttgtgtacacacactggtactggtcaggcaataacagttacaccggaagccaatatggatcaagaatcctttggtggtgcatcgtgttgtctgtactgccgttgccacatagatcatccaaatcctaaaggattttgtgacttaaaaggtaagtatgtacaaatacctacaacttgtgctaatgaccctgtgggttttacacttaaaaacacagtctgtaccgtctgcggtatgtggaaaggttatggctgtagttgtgatcaactccgcgaacccatgcttcagtcagctgatgcacaatcgtttttaaacgggtttgcggtgtaagtgcagcccgtcttacaccgtgcggcacaggcactagtactgatgtcgtatacagggcttttgacatctacaatgataaagtagctggttttgctaaattcctaaaaactaattgttgtcgcttccaagaaaaggacgaagatgacaatttaattgattcttactttgtagttaagagacacactttctctaactaccaacatgaagaaacaatttataatttacttaaggattgtccagctgttgctaaacatgacttctttaagtttagaatagacggtgacatggtaccacatatatcacgtcaacgtcttactaaatacacaatggcagacctcgtctatgctttaaggcattttgatgaaggtaattgtgacacattaaaagaaatacttgtcacatacaattgttgtgatgatgattatttcaataaaaaggactggtatgattttgtagaaaacccagatatattacgcgtatacgccaacttaggtgaacgtgtacgccaagctttgttaaaaacagtacaattctgtgatgccatgcgaaatgctggtattgttggtgtactgacattagataatcaagatctcaatggtaactggtatgatttcggtgatttcatacaaaccacgccaggtagtggagttcctgttgtagattcttattattcattgttaatgcctatattaaccttgaccagggctttaactgcagagtcacatgttgacactgacttaacaaagccttacattaagtgggatttgttaaaatatgacttcacggaagagaggttaaaactctttgaccgttattttaaatattgggatcagacataccacccaaattgtgttaactgtttggatgacagatgcattctgcattgtgcaaactttaatgttttattctctacagtgttcccacctacaagttttggaccactagtgagaaaaatatttgttgatggtgttccatttgtagtttcaactggataccacttcagagagctaggtgttgtacataatcaggatgtaaacttacatagctctagacttagttttaaggaattacttgtgtatgctgctgaccctgctatgcacgctgcttctggtaatctattactagataaacgcactacgtgcttttcagtagctgcacttactaacaatgttgcttttcaaactgtcaaacccggtaattttaacaaagacttctatgactttgctgtgtctaagggtttctttaaggaaggaagttctgttgaattaaaacacttcttctttgctcaggatggtaatgctgctatcagcgattatgactactatcgttataatctaccaacaatgtgtgatatcagacaactactatttgtagttgaagttgttgataagtactttgattgttacgatggtggctgtattaatgctaaccaagtcatcgtcaacaacctagacaaatcagctggttttccatttaataaatggggtaaggctagactttattatgattcaatgagttatgaggatcaagatgcacttttcgcatatacaaaacgtaatgtcatccctactataactcaaatgaatcttaagtatgccattagtgcaaagaatagagctcgcaccgtagctggtgtctctatctgtagtactatgaccaatagacagtttcatcaaaaattattgaaatcaatagccgccactagaggagctactgtagtaattggaacaagcaaattctatggtggttggcacaacatgttaaaaactgtttatagtgatgtagaaaaccctcaccttatgggttgggattatcctaaatgtgatagagccatgcctaacatgcttagaattatggcctcacttgttcttgctcgcaaacatacaacgtgttgtagcttgtcacaccgtttctatagattagctaatgagtgtgctcaagtattgagtgaaatggtcatgtgtggcggttcactatatgttaaaccaggtggaacctcatcaggagatgccacaactgcttatgctaatagtgtttttaacatttgtcaagctgtcacggccaatgttaatgcacttttatctactgatggtaacaaaattgccgataagtatgtccgcaatttacaacacagactttatgagtgtctctatagaaatagagatgttgacacagactttgtgaatgagttttacgcatatttgcgtaaacatttctcaatgatgatactctctgacgatgctgttgtgtgtttcaatagcacttatgcatctcaaggtctagtggctagcataaagaactttaagtcagttctttattatcaaaacaatgtttttatgtctgaagcaaaatgttggactgagactgaccttactaaaggacctcatgaattttgctctcaacatacaatgctagttaaacagggtgatgattatgtgtaccttccttacccagatccatcaagaatcctaggggccggctgttttgtagatgatatcgtaaaaacagatggtacacttatgattgaacggttcgtgtctttagctatagatgcttacccacttactaaacatcctaatcaggagtatgctgatgtctttcatttgtacttacaatacataagaaagctacatgatgagttaacaggacacatgttagacatgtattctgttatgcttactaatgataacacttcaaggtattgggaacctgagttttatgaggctatgtacacaccgcatacagtcttacaggctgttggggcttgtgttctttgcaattcacagacttcattaagatgtggtgcttgcatacgtagaccattcttatgttgtaaatgctgttacgaccatgtcatatcaacatcacataaattagtcttgtctgttaatccgtatgtttgcaatgctccaggttgtgatgtcacagatgtgactcaactttacttaggaggtatgagctattattgtaaatcacataaaccacccattagttttccattgtgtgctaatggacaagtttttggtttatataaaaatacatgtgttggtagcgataatgttactgactttaatgcaattgcaacatgtgactggacaaatgctggtgattacattttagctaacacctgtactgaaagactcaagctttttgcagcagaaacgctcaaagctactgaggagacatttaaactgtcttatggtattgctactgtacgtgaagtgctgtctgacagagaattacatctttcatgggaagttggtaaacctagaccaccacttaaccgaaattatgtctttactggttatcgtgtaactaaaaacagtaaagtacaaataggagagtacacctttgaaaaaggtgactatggtgatgctgttgtttaccgaggtacaacaacttacaaattaaatgttggtgattattttgtgctgacatcacatacagtaatgccattaagtgcacctacactagtgccacaagagcactatgttagaattactggcttatacccaacactcaatatctcagatgagttttctagcaatgttgcaaattatcaaaaggttggtatgcaaaagtattctacactccagggaccacctggtactggtaagagtcattttgctattggcctagctctctactacccttctgctcgcatagtgtatacagcttgctctcatgccgctgttgatgcactatgtgagaaggcattaaaatatttgcctatagataaatgtagtagaattatacctgcacgtgctcgtgtagagtgttttgataaattcaaagtgaattcaacattagaacagtatgtcttttgtactgtaaatgcattgcctgagacgacagcagatatagttgtctttgatgaaatttcaatggccacaaattatgatttgagtgttgtcaatgccagattacgtgctaagcactatgtgtacattggcgaccctgctcaattacctgcaccacgcacattgctaactaagggcacactagaaccagaatatttcaattcagtgtgtagacttatgaaaactataggtccagacatgttcctcggaacttgtcggcgttgtcctgctgaaattgttgacactgtgagtgctttggtttatgataataagcttaaagcacataaagacaaatcagctcaatgctttaaaatgttttataagggtgttatcacgcatgatgtttcatctgcaattaacaggccacaaataggcgtggtaagagaattccttacacgtaaccctgcttggagaaaagctgtctttatttcaccttataattcacagaatgctgtagcctcaaagattttgggactaccaactcaaactgttgattcatcacagggctcagaatatgactatgtcatattcactcaaaccactgaaacagctcactcttgtaatgtaaacagatttaatgttgctattaccagagcaaaagtaggcatactttgcataatgtctgatagagacctttatgacaagttgcaatttacaagtcttgaaattccacgtaggaatgtggcaactttacaagctgaaaatgtaacaggactctttaaagattgtagtaaggtaatcactgggttacatcctacacaggcacctacacacctcagtgttgacactaaattcaaaactgaaggtttatgtgttgacatacctggcatacctaaggacatgacctatagaagactcatctctatgatgggttttaaaatgaattatcaagttaatggttaccctaacatgtttatcacccgcgaagaagctataagacatgtacgtgcatggattggcttcgatgtcgaggggtgtcatgctactagagaagctgttggtaccaatttacctttacagctaggtttttctacaggtgttaacctagttgctgtacctacaggttatgttgatacacctaataatacagatttttccagagttagtgctaaaccaccgcctggagatcaatttaaacacctcataccacttatgtacaaaggacttccttggaatgtagtgcgtataaagattgtacaaatgttaagtgacacacttaaaaatctctctgacagagtcgtatttgtcttatgggcacatggctttgagttgacatctatgaagtattttgtgaaaataggacctgagcgcacctgttgtctatgtgatagacgtgccacatgcttttccactgcttcagacacttatgcctgttggcatcattctattggatttgattacgtctataatccgtttatgattgatgttcaacaatggggttttacaggtaacctacaaagcaaccatgatctgtattgtcaagtccatggtaatgcacatgtagctagttgtgatgcaatcatgactaggtgtctagctgtccacgagtgctttgttaagcgtgttgactggactattgaatatcctataattggtgatgaactgaagattaatgcggcttgtagaaaggttcaacacatggttgttaaagctgcattattagcagacaaattcccagttcttcacgacattggtaaccctaaagctattaagtgtgtacctcaagctgatgtagaatggaagttctatgatgcacagccttgtagtgacaaagcttataaaatagaagaattattctattcttatgccacacattctgacaaattcacagatggtgtatgcctattttggaattgcaatgtcgatagatatcctgctaattccattgtttgtagatttgacactagagtgctatctaaccttaacttgcctggttgtgatggtggcagtttgtatgtaaataaacatgcattccacacaccagcttttgataaaagtgcttttgttaatttaaaacaattaccatttttctattactctgacagtccatgtgagtctcatggaaaacaagtagtgtcagatatagattatgtaccactaaagtctgctacgtgtataacacgttgcaatttaggtggtgctgtctgtagacatcatgctaatgagtacagattgtatctcgatgcttataacatgatgatctcagctggctttagcttgtgggtttacaaacaatttgatacttataacctctggaacacttttacaagacttcagagtttagaaaatgtggcttttaatgttgtaaataagggacactttgatggacaacagggtgaagtaccagtttctatcattaataacactgtttacacaaaagttgatggtgttgatgtagaattgtttgaaaataaaacaacattacctgttaatgtagcatttgagctttgggctaagcgcaacattaaaccagtaccagaggtgaaaatactcaataatttgggtgtggacattgctgctaatactgtgatctgggactacaaaagagatgctccagcacatatatctactattggtgtttgttctatgactgacatagccaagaaaccaactgaaacgatttgtgcaccactcactgtcttttttgatggtagagttgatggtcaagtagacttatttagaaatgcccgtaatggtgttcttattacagaaggtagtgttaaaggtttacaaccatctgtaggtcccaaacaagctagtcttaatggagtcacattaattggagaagccgtaaaaacacagttcaattattataagaaagttgatggtgttgtccaacaattacctgaaacttactttactcagagtagaaatttacaagaatttaaacccaggagtcaaatggaaattgatttcttagaattagctatggatgaattcattgaacggtataaattagaaggctatgccttcgaacatatcgtttatggagattttagtcatagtcagttaggtggtttacatctactgattggactagctaaacgttttaaggaatcaccttttgaattagaagattttattcctatggacagtacagttaaaaactatttcataacagatgcgcaaacaggttcatctaagtgtgtgtgttctgttattgatttattacttgatgattttgttgaaataataaaatcccaagatttatctgtagtttctaaggttgtcaaagtgactattgactatacagaaatttcatttatgctttggtgtaaagatggccatgtagaaacattttacccaaaattacaatctagtcaagcgtggcaaccgggtgttgctatgcctaatctttacaaaatgcaaagaatgctattagaaaagtgtgaccttcaaaattatggtgatagtgcaacattacctaaaggcataatgatgaatgtcgcaaaatatactcaactgtgtcaatatttaaacacattaacattagctgtaccctataatatgagagttatacattttggtgctggttctgataaaggagttgcaccaggtacagctgttttaagacagtggttgcctacgggtacgctgcttgtcgattcagatcttaatgactttgtctctgatgcagattcaactttgattggtgattgtgcaactgtacatacagctaataaatgggatctcattattagtgatatgtacgaccctaagactaaaaatgttacaaaagaaaatgactctaaagagggttttttcacttacatttgtgggtttatacaacaaaagctagctcttggaggttccgtggctataaagataacagaacattcttggaatgctgatctttataagctcatgggacacttcgcatggtggacagcctttgttactaatgtgaatgcgtcatcatctgaagcatttttaattggatgtaattatcttggcaaaccacgcgaacaaatagatggttatgtcatgcatgcaaattacatattttggaggaatacaaatccaattcagttgtcttcctattctttatttgacatgagtaaatttccccttaaattaaggggtactgctgttatgtctttaaaagaaggtcaaatcaatgatatgattttatctcttcttagtaaaggtagacttataattagagaaaacaacagagttgttatttctagtgatgttcttgttaacaactaaacgaacaatgtttgtttttcttgttttattgccactagtctctagtcagtgtgttaatcttacaaccagaactcaattaccccctgcatacactaattctttcacacgtggtgtttattaccctgacaaagttttcagatcctcagttttacattcaactcaggacttgttcttacctttcttttccaatgttacttggttccatgctatacatgtctctgggaccaatggtactaagaggtttgataaccctgtcctaccatttaatgatggtgtttattttgcttccactgagaagtctaacataataagaggctggatttttggtactactttagattcgaagacccagtccctacttattgttaataacgctactaatgttgttattaaagtctgtgaatttcaattttgtaatgatccatttttgggtgtttattaccacaaaaacaacaaaagttggatggaaagtgagttcagagtttattctagtgcgaataattgcacttttgaatatgtctctcagccttttcttatggaccttgaaggaaaacagggtaatttcaaaaatcttagggaatttgtgtttaagaatattgatggttattttaaaatatattctaagcacacgcctattaatttagtgcgtgatctcccccagggtttttcggctttagaaccattggtagatttgccaataggtattaacatcactaggtttcaaactttacttgctttacatagaagttatttgactcctggtgattcttcttcaggttggacagctggtgctgcagcttattatgtgggttatcttcaacctaggacttttctattaaaatataatgaaaatggaaccattacagatgctgtagactgtgcacttgaccctctctcagaaacaaagtgtacgttgaaatccttcactgtagaaaaaggaatctatcaaacttctaactttagagtccaaccaacagaatctattgttagatttcctaatattacaaacttgtgcccttttggtgaagtttttaacgccaccagatttgcatctgtttatgcttggaacaggaagagaatcagcaactgtgttgctgattattctgtcctatataattccgcatcattttccacttttaagtgttatggagtgtctcctactaaattaaatgatctctgctttactaatgtctatgcagattcatttgtaattagaggtgatgaagtcagacaaatcgctccagggcaaactggaaagattgctgattataattataaattaccagatgattttacaggctgcgttatagcttggaattctaacaatcttgattctaaggttggtggtaattataattacctgtatagattgtttaggaagtctaatctcaaaccttttgagagagatatttcaactgaaatctatcaggccggtagcacaccttgtaatggtgttgaaggttttaattgttactttcctttacaatcatatggtttccaacccactaatggtgttggttaccaaccatacagagtagtagtactttcttttgaacttctacatgcaccagcaactgtttgtggacctaaaaagtctactaatttggttaaaaacaaatgtgtcaatttcaacttcaatggtttaacaggcacaggtgttcttactgagtctaacaaaaagtttctgcctttccaacaatttggcagagacattgctgacactactgatgctgtccgtgatccacagacacttgagattcttgacattacaccatgttcttttggtggtgtcagtgttataacaccaggaacaaatacttctaaccaggttgctgttctttatcaggatgttaactgcacagaagtccctgttgctattcatgcagatcaacttactcctacttggcgtgtttattctacaggttctaatgtttttcaaacacgtgcaggctgtttaataggggctgaacatgtcaacaactcatatgagtgtgacatacccattggtgcaggtatatgcgctagttatcagactcagactaattctcctcggcgggcacgtagtgtagctagtcaatccatcattgcctacactatgtcacttggtgcagaaaattcagttgcttactctaataactctattgccatacccacaaattttactattagtgttaccacagaaattctaccagtgtctatgaccaagacatcagtagattgtacaatgtacatttgtggtgattcaactgaatgcagcaatcttttgttgcaatatggcagtttttgtacacaattaaaccgtgctttaactggaatagctgttgaacaagacaaaaacacccaagaagtttttgcacaagtcaaacaaatttacaaaacaccaccaattaaagattttggtggttttaatttttcacaaatattaccagatccatcaaaaccaagcaagaggtcatttattgaagatctacttttcaacaaagtgacacttgcagatgctggcttcatcaaacaatatggtgattgccttggtgatattgctgctagagacctcatttgtgcacaaaagtttaacggccttactgttttgccacctttgctcacagatgaaatgattgctcaatacacttctgcactgttagcgggtacaatcacttctggttggacctttggtgcaggtgctgcattacaaataccatttgctatgcaaatggcttataggtttaatggtattggagttacacagaatgttctctatgagaaccaaaaattgattgccaaccaatttaatagtgctattggcaaaattcaagactcactttcttccacagcaagtgcacttggaaaacttcaagatgtggtcaaccaaaatgcacaagctttaaacacgcttgttaaacaacttagctccaattttggtgcaatttcaagtgttttaaatgatatcctttcacgtcttgacaaagttgaggctgaagtgcaaattgataggttgatcacaggcagacttcaaagtttgcagacatatgtgactcaacaattaattagagctgcagaaatcagagcttctgctaatcttgctgctactaaaatgtcagagtgtgtacttggacaatcaaaaagagttgatttttgtggaaagggctatcatcttatgtccttccctcagtcagcacctcatggtgtagtcttcttgcatgtgacttatgtccctgcacaagaaaagaacttcacaactgctcctgccatttgtcatgatggaaaagcacactttcctcgtgaaggtgtctttgtttcaaatggcacacactggtttgtaacacaaaggaatttttatgaaccacaaatcattactacagacaacacatttgtgtctggtaactgtgatgttgtaataggaattgtcaacaacacagtttatgatcctttgcaacctgaattagactcattcaaggaggagttagataaatattttaagaatcatacatcaccagatgttgatttaggtgacatctctggcattaatgcttcagttgtaaacattcaaaaagaaattgaccgcctcaatgaggttgccaagaatttaaatgaatctctcatcgatctccaagaacttggaaagtatgagcagtatataaaatggccatggtacatttggctaggttttatagctggcttgattgccatagtaatggtgacaattatgctttgctgtatgaccagttgctgtagttgtctcaagggctgttgttcttgtggatcctgctgcaaatttgatgaagacgactctgagccagtgctcaaaggagtcaaattacattacacataaacgaacttatggatttgtttatgagaatcttcacaattggaactgtaactttgaagcaaggtgaaatcaaggatgctactccttcagattttgttcgcgctactgcaacgataccgatacaagcctcactccctttcggatggcttattgttggcgttgcacttcttgctgtttttcagagcgcttccaaaatcataaccctcaaaaagagatggcaactagcactctccaagggtgttcactttgtttgcaacttgctgttgttgtttgtaacagtttactcacaccttttgctcgttgctgctggccttgaagccccttttctctatctttatgctttagtctacttcttgcagagtataaactttgtaagaataataatgaggctttggctttgctggaaatgccgttccaaaaacccattactttatgatgccaactattttctttgctggcatactaattgttacgactattgtataccttacaatagtgtaacttcttcaattgtcattacttcaggtgatggcacaacaagtcctatttctgaacatgactaccagattggtggttatactgaaaaatgggaatctggagtaaaagactgtgttgtattacacagttacttcacttcagactattaccagctgtactcaactcaattgagtacagacactggtgttgaacatgttaccttcttcatctacaataaaattgttgatgagcctgaagaacatgtccaaattcacacaatcgacggttcatccggagttgttaatccagtaatggaaccaatttatgatgaaccgacgacgactactagcgtgcctttgtaagcacaagctgatgagtacgaacttatgtactcattcgtttcggaagagacaggtacgttaatagttaatagcgtacttctttttcttgctttcgtggtattcttgctagttacactagccatccttactgcgcttcgattgtgtgcgtactgctgcaatattgttaacgtgagtcttgtaaaaccttctttttacgtttactctcgtgttaaaaatctgaattcttctagagttcctgatcttctggtctaaacgaactaaatattatattagtttttctgtttggaactttaattttagccatggcagattccaacggtactattaccgttgaagagcttaaaaagctccttgaacaatggaacctagtaataggtttcctattccttacatggatttgtcttctacaatttgcctatgccaacaggaataggtttttgtatataattaagttaattttcctctggctgttatggccagtaactttagcttgttttgtgcttgctgctgtttacagaataaattggatcaccggtggaattgctatcgcaatggcttgtcttgtaggcttgatgtggctcagctacttcattgcttctttcagactgtttgcgcgtacgcgatccatgtggtcattcaatccagaaactaacattcttctcaacgtgccactccatggcactattctgaccagaccgcttctagaaagtgaactcgtaatcggagctgtgatccttcgtggacatcttcgtattgctggacaccatctaggacgctgtgacatcaaggacctgcctaaagaaatcactgttgctacatcacgaacgctttcttattacaaattgggagcttcgcagcgtgtagcaggtgactcaggttttgctgcatacagtcgctacaggattggcaactataaattaaacacagaccattccagtagcagtgacaatattgctttgcttgtacagtaagtgacaacagatgtttcatctcgttgactttcaggttactatagcagagatattactaattattatgaggacttttaaagtttccatttggaatcttgattacatcataaacctcataattaaaaatttatctaagtcactaactgagaataaatattctcaattagatgaagagcaaccaatggagattgattaaacgaacatgaaaattattcttttcttggcactgataacactcgctacttgtgagctttatcactaccaagagtgtgttagaggtacaacagtacttttaaaagaaccttgctcttctggaacatacgagggcaattcaccatttcatcctctagctgataacaaatttgcactgacttgctttagcactcaatttgcttttgcttgtcctgacggcgtaaaacacgtctatcagttacgtgccagatcagtttcacctaaactgttcatcagacaagaggaagttcaagaactttactctccaatttttcttattgttgcggcaatagtgtttataacactttgcttcacactcaaaagaaagacagaatgattgaactttcattaattgacttctatttgtgctttttagcctttctgctattccttgttttaattatgcttattatcttttggttctcacttgaactgcaagatcataatgaaacttgtcacgcctaaacgaacatgaaatttcttgttttcttaggaatcatcacaactgtagctgcatttcaccaagaatgtagtttacagtcatgtactcaacatcaaccatatgtagttgatgacccgtgtcctattcacttctattctaaatggtatattagagtaggagctagaaaatcagcacctttaattgaattgtgcgtggatgaggctggttctaaatcacccattcagtacatcgatatcggtaattatacagtttcctgtttaccttttacaattaattgccaggaacctaaattgggtagtcttgtagtgcgttgttcgttctatgaagactttttagagtatcatgacgttcgtgttgttttagatttcatctaaacgaacaaactaaaatgtctgataatggaccccaaaatcagcgaaatgcaccccgcattacgtttggtggaccctcagattcaactggcagtaaccagaatggagaacgcagtggggcgcgatcaaaacaacgtcggccccaaggtttacccaataatactgcgtcttggttcaccgctctcactcaacatggcaaggaagaccttaaattccctcgaggacaaggcgttccaattaacaccaatagcagtccagatgaccaaattggctactaccgaagagctaccagacgaattcgtggtggtgacggtaaaatgaaagatctcagtccaagatggtatttctactacctaggaactgggccagaagctggacttccctatggtgctaacaaagacggcatcatatgggttgcaactgagggagccttgaatacaccaaaagatcacattggcacccgcaatcctgctaacaatgctgcaatcgtgctacaacttcctcaaggaacaacattgccaaaaggcttctacgcagaagggagcagaggcggcagtcaagcctcttctcgttcctcatcacgtagtcgcaacagttcaagaaattcaactccaggcagcagtaggggaacttctcctgctagaatggctggcaatggcggtgatgctgctcttgctttgctgctgcttgacagattgaaccagcttgagagcaaaatgtctggtaaaggccaacaacaacaaggccaaactgtcactaagaaatctgctgctgaggcttctaagaagcctcggcaaaaacgtactgccactaaagcatacaatgtaacacaagctttcggcagacgtggtccagaacaaacccaaggaaattttggggaccaggaactaatcagacaaggaactgattacaaacattggccgcaaattgcacaatttgcccccagcgcttcagcgttcttcggaatgtcgcgcattggcatggaagtcacaccttcgggaacgtggttgacctacacaggtgccatcaaattggatgacaaagatccaaatttcaaagatcaagtcattttgctgaataagcatattgacgcatacaaaacattcccaccaacagagcctaaaaaggacaaaaagaagaaggctgatgaaactcaagccttaccgcagagacagaagaaacagcaaactgtgactcttcttcctgctgcagatttggatgatttctccaaacaattgcaacaatccatgagcagtgctgactcaactcaggcctaaactcatgcagaccacacaaggcagatgggctatataaacgttttcgcttttccgtttacgatatatagtctactcttgtgcagaatgaattctcgtaactacatagcacaagtagatgtagttaactttaatctcacatagcaatctttaatcagtgtgtaacattagggaggacttgaaagagccaccacattttcaccgaggccacgcggagtacgatcgagtgtacagtgaacaatgctagggagagctgcctatatggaagagccctaatgtgtaaaattaattttagtagtgctatccccatgtgattttaatagcttcttaggagaatgacaaaaaaaaaaaaaaaaaaaaaaaaaaaaaaaaaaaaaaaaaaaaaaaaaaaaaaaaaaagggtcggcatggcatctccacctcctcgcggtccgacctgggcatccgaaggaggacgcacgtccactcggatggctaagggagcagcacactggcggccgttactagggccgcgcccttcccaacagttgcgcagcctgaatggcgaatggagatccaatttttaagtgtataatgtgttaaactactgattctaattgtttgtgtattttagattcacagtcccaaggctcatttcaggcccctcagtcctcacagtctgttcatgatcataatcagccataccacatttgtagaggttttacttgctttaaaaaacctcccacacctccccctgaacctgaaacataaaatgaatgcaattgttgttgttaacttgtttattgcagcttataatggttacaaataaagcaatagcatcacaaatttcacaaataaagcatttttttcactgcattctagttgtggtttgtccaaactcatcaatgtatcttaaagcttgagtattctatagtctcacctaaatagcttggcgtaatcatggtcatagctgtttcctgtgtgaaattgttatccgctcacaattccacacaacatacgagccggaagcataaagtgtaaagcctggggtgcctaatgagtgagctaactcacattaattgcgttgcgctcactgcccgctttccagtcgggaaacctgtcgtgccagctgcattaatgaatcggccaacgcgaaccccttgcggccgcccgggccgtcgaccaattctcatgtttgacagcttatcatcgaatttctgccattcatccgcttattatcacttattcaggcgtagcaaccaggcgtttaagggcaccaataactgccttaaaaaaattacgccccgccctgccactcatcgcagtactgttgtaattcattaagcattctgccgacatggaagccatcacaaacggcatgatgaacctgaatcgccagcggcatcagcaccttgtcgccttgcgtataatatttgcccatggtgaaaacgggggcgaagaagttgtccatattggccacgtttaaatcaaaactggtgaaactcacccagggattggctgagacgaaaaacatattctcaataaaccctttagggaaataggccaggttttcaccgtaacacgccacatcttgcgaatatatgtgtagaaactgccggaaatcgtcgtggtattcactccagagcgatgaaaacgtttcagtttgctcatggaaaacggtgtaacaagggtgaacactatcccatatcaccagctcaccgtctttcattgccatacgaaattccggatgagcattcatcaggcgggcaagaatgtgaataaaggccggataaaacttgtgcttatttttctttacggtctttaaaaaggccgtaatatccagctgaacggtctggttataggtacattgagcaactgactgaaatgcctcaaaatgttctttacgatgccattgggatatatcaacggtggtatatccagtgatttttttctccattttagcttccttagctcctgaaaatctcgataactcaaaaaatacgcccggtagtgatcttatttcattatggtgaaagttggaacctcttacgtgccgatcaacgtctcattttcgccaaaagttggcccagggcttcccggtatcaacagggacaccaggatttatttattctgcgaagtgatcttccgtcacaggtatttattcgcgataagctcatggagcggcgtaaccgtcgcacaggaaggacagagaaagcgcggatctgggaagtgacggacagaacggtcaggacctggattggggaggcggttgccgccgctgctgctgacggtgtgacgttctctgttccggtcacaccacatacgttccgccattcctatgcgatgcacatgctgtatgccggtataccgctgaaagttctgcaaagcctgatgggacataagtccatcagttcaacggaagtctacacgaaggtttttgcgctggatgtggctgcccggcaccgggtgcagtttgcgatgccggagtctgatgcggttgcgatgctgaaacaattatcctgagaataaatgccttggcctttatatggaaatgtggaactgagtggatatgctgtttttgtctgttaaacagagaagctggctgttatccactgagaagcgaacgaaacagtcgggaaaatctcccattatcgtagagatccgcattattaatctcaggagcctgtgtagcgtttataggaagtagtgttctgtcatgatgcctgcaagcggtaacgaaaacgatttgaatatgccttcaggaacaatagaaatcttcgtgcggtgttacgttgaagtggagcggattatgtcagcaatggacagaacaacctaatgaacacagaaccatgatgtggtctgtccttttacagccagtagtgctcgccgcagtcgagcgacagggcgaagccctcggctggttgccctcgccgctgggctggcggccgtctatggccctgcaaacgcgccagaaacgccgtcgaagccgtgtgcgagacaccgcggccggccgccggcgttgtggatacctcgcggaaaacttggccctcactgacagatgaggggcggacgttgacacttgaggggccgactcacccggcgcggcgttgacagatgaggggcaggctcgatttcggccggcgacgtggagctggccagcctcgcaaatcggcgaaaacgcctgattttacgcgagtttcccacagatgatgtggacaagcctggggataagtgccctgcggtattgacacttgaggggcgcgactactgacagatgaggggcgcgatccttgacacttgaggggcagagtgctgacagatgaggggcgcacctattgacatttgaggggctgtccacaggcagaaaatccagcatttgcaagggtttccgcccgtttttcggccaccgctaacctgtcttttaacctgcttttaaaccaatatttataaaccttgtttttaaccagggctgcgccctgtgcgcgtgaccgcgcacgccgaaggggggtgcccccccttctcgaaccctcccggtcgagtgagcgaggaagcaccagggaacagcacttatatattctgcttacacacgatgcctgaaaaaacttcccttggggttatccacttatccacggggatatttttataattattttttttatagtttttagatcttcttttttagagcgccttgtaggcctttatccatgctggttctagagaaggtgttgtgacaaattgccctttcagtgtgacaaatcaccctcaaatgacagtcctgtctgtgacaaattgcccttaaccctgtgacaaattgccctcagaagaagctgttttttcacaaagttatccctgcttattgactcttttttatttagtgtgacaatctaaaaacttgtcacacttcacatggatctgtcatggcggaaacagcggttatcaatcacaagaaacgtaaaaatagcccgcgaatcgtccagtcaaacgacctcactgaggcggcatatagtctctcccgggatcaaaaacgtatgctgtatctgttcgttgaccagatcagaaaatctgatggcaccctacaggaacatgacggtatctgcgagatccatgttgctaaatatgctgaaatattcggattgacctctgcggaagccagtaaggatatacggcaggcattgaagagtttcgcggggaaggaagtggttttttatcgccctgaagaggatgccggcgatgaaaaaggctatgaatcttttccttggtttatcaaacgtgcgcacagtccatccagagggctttacagtgtacatatcaacccatatctcattcccttctttatcgggttacagaaccggtttacgcagtttcggcttagtgaaacaaaagaaatcaccaatccgtatgccatgcgtttatacgaatccctgtgtcagtatcgtaagccggatggctcaggcatcgtctctctgaaaatcgactggatcatagagcgttaccagctgcctcaaagttaccagcgtatgcctgacttccgccgccgcttcctgcaggtctgtgttaatgagatcaacagcagaactccaatgcgcctctcatacattgagaaaaagaaaggccgccagacgactcatatcgtattttccttccgcgatatcacttccatgacgacaggatagtctgagggttatctgtcacagatttgagggtggttcgtcacatttgttctgacctactgagggtaatttgtcacagttttgctgtttccttcagcctgcatggattttctcatactttttgaactgtaatttttaaggaagccaaatttgagggcagtttgtcacagttgatttccttctctttcccttcgtcatgtgacctgatatcgggggttagttcgtcatcattgatgagggttgattatcacagtttattactctgaattggctatccgcgtgtgtacctctacctggagtttttcccacggtggatatttcttcttgcgctgagcgtaagagctatctgacagaacagttcttctttgcttcctcgccagttcgctcgctatgctcggttacacggctgcggcg

SEQ ID NO: 9 - DNA, 35283 bp, Artificial Sequence
  Clone pCCI-4K-SARS-CoV-2-DWDDD. Based on SARS-CoV-2.
gatgtgctgcaaggcgattaagttgggtaacgccagggttttcccagtcacgacgttgtaaaacgacggccagtgaattgtaatacgactcactatagggcgaattctagttattaatagtaatcaattacggggtcattagttcatagcccatatatggagttccgcgttacataacttacggtaaatggcccgcctggctgaccgcccaacgacccccgcccattgacgtcaataatgacgtatgttcccatagtaacgccaatagggactttccattgacgtcaatgggtggagtatttacggtaaactgcccacttggcagtacatcaagtgtatcatatgccaagtacgccccctattgacgtcaatgacggtaaatggcccgcctggcattatgcccagtacatgaccttatgggactttcctacttggcagtacatctacgtattagtcatcgctattaccatggtgatgcggttttggcagtacatcaatgggcgtggatagcggtttgactcacggggatttccaagtctccaccccattgacgtcaatgggagtttgttttggcaccaaaatcaacgggactttccaaaatgtcgtaacaactccgccccattgacgcaaatgggcggtaggcgtgtacggtgggaggtctatataagcagagctggtttagtgaaccgtattaaaggtttataccttcccaggtaacaaaccaaccaactttcgatctcttgtagatctgttctctaaacgaactttaaaatctgtgtggctgtcactcggctgcatgcttagtgcactcacgcagtataattaataactaattactgtcgttgacaggacacgagtaactcgtctatcttctgcaggctgcttacggtttcgtccgtgttgcagccgatcatcagcacatctaggtttcgtccgggtgtgaccgaaaggtaagatggagagccttgtccctggtttcaacgagaaaacacacgtccaactcagtttgcctgttttacaggttcgcgacgtgctcgtacgtggctttggagactccgtggaggaggtcttatcagaggcacgtcaacatcttaaagatggcacttgtggcttagtagaagttgaaaaaggcgttttgcctcaacttgaacagccctatgtgttcatcaaacgttcggatgctcgaactgcacctcatggtcatgttatggttgagctggtagcagaactcgaaggcattcagtacggtcgtagtggtgagacacttggtgtccttgtccctcatgtgggcgaaataccagtggcttaccgcaaggttcttcttcgtaagaacggtaataaaggagctggtggccatagttacggcgccgatctaaagtcatttgacttaggcgacgagcttggcactgatccttatgaagattttcaagaaaactggaacactaaacatagcagtggtgttacccgtgaactcatgcgtgagcttaacggaggggcatacactcgctatgtcgataacaacttctgtggccctgatggctaccctcttgagtgcattaaagaccttctagcacgtgctggtaaagcttcatgcactttgtccgaacaactggactttattgacactaagaggggtgtatactgctgccgtgaacatgagcatgaaattgcttggtacacggaacgttctgaaaagagctatgaattgcagacaccttttgaaattaaattggcaaagaaatttgacaccttcaatggggaatgtccaaattttgtatttcccttaaattccataatcaagactattcaaccaagggttgaaaagaaaaagcttgatggctttatgggtagaattcgatctgtctatccagttgcgtcaccaaatgaatgcaaccaaatgtgcctttcaactctcatgaagtgtgatcattgtggtgaaacttcatggcagacgggcgattttgttaaagccacttgcgaattttgtggcactgagaatttgactaaagaaggtgccactacttgtggttacttaccccaaaatgctgttgttaaaatttattgtccagcatgtcacaattcagaagtaggacctgagcatagtcttgccgaataccataatgaatctggcttgaaaaccattcttcgtaagggtggtcgcactattgcctttggaggctgtgtgttctcttatgttggttgccataacaagtgtgcctattgggtcccgcgtgcgagtgcgaacataggttgtaatcatacgggtgtagtaggtgaaggttcggaaggtctaaatgataatctactagaaatactacaaaaagaaaaagtaaatataaatatagtaggtgattttaaactaaatgaagaaatagcgataatattagcgtcgttttcggcgtcgacgagtgcgtttgtagaaacggtaaaaggtttagattataaagcgtttaaacaaatagtagaatcgtgtggtaattttaaagtgacgaaaggtaaagcgaaaaaaggtgcgtggaatataggtgaacaaaaatcgatactaagtccgctatatgcgtttgcgtcggaagcggcgcgtgtagtacgttcgatattttcgcgtacgctagaaacggcgcaaaattcggtacgtgtattacaaaaagcggcgataacgatactagatggtatatcgcaatattcgctacgtctaatagatgcgatgatgtttacgtcggatttagcgacgaataatctagtagtaatggcgtatataacgggtggtgtagtacaattaacgtcgcaatggctaacgaatatatttggtacggtatatgaaaaactaaaaccggtactagattggctagaagaaaaatttaaagaaggtgtagaatttctacgtgatggttgggaaatagtaaaatttatatcgacgtgtgcgtgtgaaatagtaggtggtcaaatagtaacgtgtgcgaaagaaataaaagaatcggtacaaacgttttttaaactagtaaataaatttctagcgctatgtgcggattcgataataataggtggtgcgaaactaaaagcgctaaatctaggtgaaacgtttgtgacgcattcgaaaggtttatatcgtaaatgtgtaaaatcgcgtgaagaaacgggtctactaatgccgctaaaagcgccgaaagaaataatatttttagaaggtgaaacgctaccgacggaagtattaacggaagaagtagtattaaaaacgggtgatttacaaccgttagaacaaccgacgtcggaagcggtagaagcgccgttagtaggtacgccggtatgtataaatggtctaatgttactagaaataaaagatacggaaaaatattgtgcgctagcgccgaatatgatggtaacgaataatacgtttacgctaaaaggtggtgcgccgacgaaagtaacgtttggtgatgatacggtaatagaagtacaaggttataaatcggtaaatataacgtttgaactagatgaacgtatagataaagtactaaatgaaaaatgttcggcgtatacggtagaactaggtacggaagtaaatgaatttgcgtgtgtagtagcggatgcggtaataaaaacgttacaaccggtatcggaattactaacgccgctaggtatagatttagatgaatggtcgatggcgacgtattatttatttgatgaatcgggtgaatttaaattagcgtcgcatatgtattgttcgttttatccgccggatgaagatgaagaagaaggtgattgtgaagaagaagaatttgaaccgtcgacgcaatatgaatatggtacggaagatgattatcaaggtaaaccgttagaatttggtgcgacgtcggcggcgctacaaccggaagaagaacaagaagaagattggttggatgatgattcgcaacaaacggtaggtcaacaagatggttcggaagataatcaaacgacgacgatacaaacgatagtagaagtacaaccgcaattagaaatggaactaacgccggtagtacaaacgatagaagtaaattcgttttcgggttatttaaaactaacggataatgtatatataaaaaatgcggatatagtagaagaagcgaaaaaagtaaaaccgacggtagtagtaaatgcggcgaatgtatatctaaaacatggtggtggtgtagcgggtgcgttaaataaagcgacgaataatgcgatgcaagtagaatcggatgattatatagcgacgaatggtccgctaaaagtaggtggttcgtgtgtattatcgggtcataatctagcgaaacattgtctacatgtagtaggtccgaatgtaaataaaggtgaagatatacaactactaaaatcggcgtatgaaaattttaatcaacatgaagtactactagcgccgttattatcggcgggtatatttggtgcggacccgatacattcgttacgtgtgtgtgtagatacggtacgcacgaatgtatatttagcggtatttgataaaaatctatatgataaactagtatcgtcgtttttagaaatgaaatcggaaaaacaagtagaacaaaaaatagcggaaataccgaaagaagaagtaaaaccgtttataacggaatcgaaaccgtcggtagaacaacgtaaacaagatgataaaaaaataaaagcgtgtgtagaagaagtaacgacgacgctagaagaaacgaaatttctaacagaaaatttattactatatatagatataaatggtaatctacatccggattcggcgacgctagtatcggatatagatataacgtttttaaaaaaagatgcgccgtatatagtaggtgatgtagtacaagaaggtgtattaacggcggtagtaataccgacgaaaaaagcgggtggtacgacggaaatgctggcgaaagcgttacgtaaagtaccgacggataattatataacgacgtacccgggtcagggtttaaatggttacactgtagaggaggcaaagacagtgcttaaaaagtgtaaaagtgccttttacattctaccatctattatctctaatgagaagcaagaaattcttggaactgtttcttggaatttgcgagaaatgcttgcacatgcagaagaaacacgcaaattaatgcctgtctgtgtggaaactaaagccatagtttcaactatacagcgtaaatataagggtattaaaatacaagagggtgtggttgattatggtgctagattttacttttacaccagtaaaacaactgtagcgtcacttatcaacacacttaacgatctaaatgaaactcttgttacaatgccacttggctatgtaacacatggcttaaatttggaagaagctgctcggtatatgagatctctcaaagtgccagctacagtttctgtttcttcacctgatgctgttacagcgtataatggttatcttacttcttcttctaaaacacctgaagaacattttattgaaaccatctcacttgctggttcctataaagattggtcctattctggacaatctacacaactaggtatagaatttcttaagagaggtgataaaagtgtatattacactagtaatcctaccacattccacctagatggtgaagttatcacctttgacaatcttaagacacttctttctttgagagaagtgaggactattaaggtgtttacaacagtagacaacattaacctccacacgcaagttgtggacatgtcaatgacatatggacaacagtttggtccaacttatttggatggagctgatgttactaaaataaaacctcataattcacatgaaggtaaaacattttatgttttacctaatgatgacactctacgtgttgaggcttttgagtactaccacacaactgatcctagttttctgggtaggtacatgtcagcattaaatcacactaaaaagtggaaatacccacaagttaatggtttaacttctattaaatgggcagataacaactgttatcttgccactgcattgttaacactccaacaaatagagttgaagtttaatccacctgctctacaagatgcttattacagagcaagggctggtgaagctgctaacttttgtgcacttatcttagcctactgtaataagacagtaggtgagttaggtgatgttagagaaacaatgagttacttgtttcaacatgccaatttagattcttgcaaaagagtcttgaacgtggtgtgtaaaacttgtggacaacagcagacaacccttaagggtgtagaagctgttatgtacatgggcacactttcttatgaacaatttaagaaaggtgttcagataccttgtacgtgtggtaaacaagctacaaaatatctagtacaacaggagtcaccttttgttatgatgtcagcaccacctgctcagtatgaacttaagcatggtacatttacttgtgctagtgagtacactggtaattaccagtgtggtcactataaacatataacttctaaagaaactttgtattgcatagacggtgctttacttacaaagtcctcagaatacaaaggtcctattacggatgttttctacaaagaaaacagttacacaacaaccataaaaccagttacttataaattggatggtgttgtttgtacagaaattgaccctaagttggacaattattataagaaagacaattcttatttcacagagcaaccaattgatcttgtaccaaaccaaccatatccaaacgcaagcttcgataattttaagtttgtatgtgataatatcaaatttgctgatgatttaaaccagttaactggttataagaaacctgcttcaagagagcttaaagttacatttttccctgacttaaatggtgatgtggtggctattgattataaacactacacaccctcttttaagaaaggagctaaattgttacataaacctattgtttggcatgttaacaatgcaactaataaagccacgtataaaccaaatacctggtgtatacgttgtctttggagcacaaaaccagttgaaacatcaaattcgtttgatgtactgaagtcagaggacgcgcagggaatggataatcttgcctgcgaagatctaaaaccagtctctgaagaagtagtggaaaatcctaccatacagaaagacgttcttgagtgtaatgtgaaaactaccgaagttgtaggagacattatacttaaaccagcaaataatagtttaaaaattacagaagaggttggccacacagatctaatggctgcttatgtagacaattctagtcttactattaagaaacctaatgaattatctagagtattaggtttgaaaacccttgctactcatggtttagctgctgttaatagtgtcccttgggatactatagctaattatgctaagccttttcttaacaaagttgttagtacaactactaacatagttacacggtgtttaaaccgtgtttgtactaattatatgccttatttctttactttattgctacaattgtgtacttttactagaagtacaaattctagaattaaagcatctatgccgactactatagcaaagaatactgttaagagtgtcggtaaattttgtctagaggcttcatttaattatttgaagtcacctaatttttctaaactgataaatattataatttggtttttactattaagtgtttgcctaggttcgttaatatattcgacggcggcgttaggtgtattaatgtcgaatttaggtatgccgtcgtattgtacgggttatcgtgaaggttatttaaattcgacgaatgtaacgatagcgacgtattgtacgggttcgataccgtgttcggtatgtctatcgggtttagattcgttagatacgtatccgtcgttagaaacgatacaaataacgatatcgtcgtttaaatgggatttaacggcgtttggtttagtagcggaatggtttttagcgtatatactatttacgcgatttttttatgtactaggtttagcggcgataatgcaattatttttttcgtattttgcggtacattttatttcgaattcgtggctaatgtggttaataataaatctagtacaaatggcgccgatatcggcgatggtacgtatgtatatattttttgcgtcgttttattatgtatggaaatcgtatgtacatgtagtagatggttgtaattcgtcgacgtgtatgatgtgttataaacgtaatcgtgcgacgcgagtagaatgtacgacgatagtaaatggtgtacgtcgttcgttttatgtatatgcgaatggtggtaaaggtttttgtaaactacataattggaattgtgtaaattgtgatacgttttgtgcgggttcgacgtttatatcggatgaagtagcgcgtgatttatcgctacaatttaaacgtccgataaatccgacggatcaatcgtcgtatatagtagattcggtaacggtaaaaaatggttcgatacatctatattttgataaagcgggtcaaaaaacgtatgaacgtcattcgctatcgcattttgtaaatttagataatctacgtgcgaataatacgaaaggttcgttaccgataaatgtaatagtatttgatggtaaatcgaaatgtgaagaatcgtcggcgaaatcggcgtcggtatattattcgcaactaatgtgtcaaccgatactattactagatcaagcgttagtatcggatgtaggtgattcggcggaagtagcggtaaaaatgtttgatgcgtatgtaaatacgttttcgtcgacgtttaatgtaccgatggaaaaactaaaaacgctagtagcgacggcggaagcggaactagcgaaaaatgtatctttagataatgtattatcgacgtttatatcggcggcgcgtcaaggttttgtagattcggatgtagaaacgaaagatgtagtagaatgtctaaaattatcgcatcaatcggatatagaagtaacgggtgattcgtgtaataattatatgctaacgtataataaagtagaaaatatgacgccgcgtgatctaggtgcgtgtatagattgttcggcgcgtcatataaatgcgcaagtagcgaaatcgcataatatagcgttaatatggaatgtaaaagattttatgtcgttatcggaacaactacgtaaacaaatacgttcggcggcgaaaaaaaataatttaccgtttaaattaacgtgtgcgacgacgcgacaagtagtaaatgtagtaacgacgaaaatagcgctaaaaggtggtaaaatagtaaataattggttaaaacaattaattaaagtaacgctagtatttctatttgtagcggcgatattttatttaataacgccggtacatgtaatgtcgaaacatacggatttttcgtcggaaataataggttataaagcgatagatggtggtgtaactcgtgatatagcgtcgacggatacgtgttttgcgaataaacatgcggattttgatacgtggttttcgcaacgtggtggttcgtatacgaatgataaagcgtgtccgttaatagcggcggtaataacacgtgaagtaggttttgtagtaccgggtttaccgggtacgatattacgtacgacgaatggtgattttttacattttttaccgcgtgtattttcggcggtaggtaatatatgttatacgccgtcgaaactaatagaatatacggattttgcgacgtcggcgtgtgtattagcggcggaatgtacgatatttaaagatgcgtcgggtaaaccggtaccgtattgttatgatacgaatgtactagaaggttcggtagcgtatgaatcgttacgcccggatacacgttatgtactaatggatggttcgataatacaatttccgaatacgtatctagaaggttcggtacgtgtagtaacgacgtttgattcggaatattgtcgtcatggtacgtgtgaacgttcggaagcgggtgtatgtgtatcgacgtcggggcgttgggtactaaataatgattattatcgttcgttaccgggtgtattctgtggtgtagatgcggtaaatttactaacgaatatgtttacgccgctgatacaaccgataggtgcgttagatatatcggcgtcgatagtagcgggtggtatagtagcgatagtagtaacgtgtctagcgtattattttatgcgttttcgtcgtgcgtttggtgaatattcgcatgtagtagcgtttaatacgttactatttctaatgtcttttacagtactatgtttaacgccggtatattcttttttaccgggtgtatattcggtaatatatttatatttaacgttttatctaacgaatgatgtatcgtttttagcgcatatacaatggatggtaatgtttacgccgttagtaccgttttggataacaatagcgtatataatatgtatatcgacgaaacatttttattggtttttttcgaattatctgaaacgtcgtgtagtatttaatggtgtatctttttcgacgtttgaagaagcggcgctatgtacatttttattaaataaagaaatgtatctaaaattacgttcggatgtactattaccgctaacgcaatataatcgttatttagcgctatataataaatataaatatttttcgggtgcgatggatacgacgtcgtatcgtgaagcggcgtgttgtcatctagcgaaagcgctaaatgatttttcgaattcgggttcggatgtactatatcaaccgccgcaaacgtcgataacgtcggcggtattacaatcgggttttcgtaaaatggcgtttccgtcgggtaaagtagaaggttgtatggtacaagtaacgtgtggtacgacgacgctaaatggtctatggctagatgatgtagtatattgtccgcgtcatgtaatatgtacgtcggaagatatgctaaatccgaattatgaagatttactaatacgtaaatcgaatcataattttttagtacaagcgggtaatgtacaactacgtgtaataggtcattcgatgcaaaattgtgtactaaaactaaaagtagatacggcgaatccgaaaacaccgaaatataaatttgtacgtatacaaccgggtcaaacgttttcggtattagcgtgttataatggttctccgtcgggtgtatatcaatgtgcgatgcgtccgaattttacgattaaaggttcgtttctaaatggttcgtgtggttcggtaggttttaatatagattatgattgtgtatcgttttgttatatgcatcatatggaattaccgacgggtgtacatgcgggtacggatttagaaggtaatttttatggtccgtttgtagatcgtcaaacagcgcaagcggcgggtacggatacgacgattacggtaaatgtattagcgtggttatatgcggcggtaataaatggtgatcgttggtttctaaatcgttttacgacgacgctaaatgattttaatctagtagcgatgaaatataattatgaaccgctgacacaagatcatgtagatatactaggtccgctatcggcgcaaacgggtatagcggtattagatatgtgtgcgtcgttaaaagaattactacaaaatggtatgaatggtcgtacgatattaggttcggcgttattagaagatgaatttacgccgtttgatgtagtacgtcaatgttcgggtgtaacgtttcaatcggcggtaaaacgtacgataaaaggtacgcatcattggttattactaacgatattaacgtcgctattagtattagtacaatcgacgcaatggtcgttatttttttttttatatgaaaatgcgtttttaccgtttgcgatgggtataatagcgatgtcggcgtttgcgatgatgtttgtaaaacataagcatgcgtttctatgtttatttttattaccgtcgctagcgacggtagcgtattttaatatggtatatatgccggcgtcgtgggtaatgcgtataatgacgtggttagatatggtagatacgtcgttatcgggttttaaactaaaagattgtgtaatgtatgcgtcggcggtagtattactaatactaatgacggcgcgtacggtatatgatgatggtgcgcgtcgtgtatggacgctaatgaatgtattaacgctagtatataaagtatattatgggaatgcgttagatcaagcgatatcgatgtgggcgctaataatatcggtaacgtcgaattattcgggtgtagtaacgacggtaatgtttttagcgcgtggtatagtatttatgtgtgtagaatattgtccgatattttttataacgggtaatacactacaatgtataatgctagtatattgttttttaggttatttttgtacgtgttattttggtctattttgtttactaaatcgttattttcgtctaacactaggtgtatatgattatttagtatcgacgcaagaatttcgttatatgaattcgcaaggtctactaccgccgaaaaattcgatagatgcgtttaaactaaatataaaattattaggtgtaggtggtaaaccgtgtataaaagtagcgacggtacaatcgaaaatgtcggatgtaaaatgtacatcggtagtattactatcggtattacaacaactacgtgtagaatcgtcgtcgaaattatgggcgcaatgtgtacaattacataatgatatactattagcgaaagatacgacggaagcgtttgaaaaaatggtatcgctactatcggtattactatcgatgcaaggtgcggtagatataaataaactatgtgaagaaatgctagataatcgtgcgacgttacaagcgatagcgtcggaattttcgtcgctaccgtcgtatgcggcgtttgcgacggcgcaagaagcgtatgaacaagcggtagcgaatggtgattcggaagtagtactaaaaaaattaaaaaaatcgttaaatgtagcgaaatcggaatttgatcgtgatgcggcgatgcaacgtaaattagaaaaaatggcggatcaagcgatgacgcaaatgtataaacaagcgcgttcggaagataaacgtgcgaaagtaacgtcggcgatgcaaacgatgctatttacgatgctacgtaaattagataatgatgcgctaaataatataataaataatgcgcgtgatggttgtgtaccgttaaatataataccgctaacgacggcggcgaaactaatggtagtaataccggattataatacatataaaaatacgtgtgatggtacgacgtttacgtatgcgtcggcgttatgggaaatacaacaagtagtagatgcggattcgaaaatagtacaactatcggaaatatcgatggataattcgccgaatttagcgtggccgctaatagtaacggcgttacgtgcgaattcggcggtaaaattacaaaataatgaactatcgccggtagcgctacgacagatgtcttgtgctgccggtactacacaaactgcttgcactgatgacaatgcgttagcttactacaacacaacaaagggaggtaggtttgtacttgcactgttatccgatttacaggatttgaaatgggctagattccctaagagtgatggaactggtactatctatacagaactggaaccaccttgtaggtttgttacagacacacctaaaggtcctaaagtgaagtatttatactttattaaaggattaaacaacctaaatagaggtatggtacttggtagtttagctgccacagtacgtctacaagctggtaatgcaacagaagtgcctgccaattcaactgtattatctttctgtgcttttgctgtagatgctgctaaagcttacaaagattatctagctagtgggggacaaccaatcactaattgtgttaagatgttgtgtacacacactggtactggtcaggcaataacagttacaccggaagccaatatggatcaagaatcctttggtggtgcatcgtgttgtctgtactgccgttgccacatagatcatccaaatcctaaaggattttgtgacttaaaaggtaagtatgtacaaatacctacaacttgtgctaatgaccctgtgggttttacacttaaaaacacagtctgtaccgtctgcggtatgtggaaaggttatggctgtagttgtgatcaactccgcgaacccatgcttcagtcagctgatgcacaatcgtttttaaacgggtttgcggtgtaagtgcagcccgtcttacaccgtgcggcacaggcactagtactgatgtcgtatacagggcttttgacatctacaatgataaagtagctggttttgctaaattcctaaaaactaattgttgtcgcttccaagaaaaggacgaagatgacaatttaattgattcttactttgtagttaagagacacactttctctaactaccaacatgaagaaacaatttataatttacttaaggattgtccagctgttgctaaacatgacttctttaagtttagaatagacggtgacatggtaccacatatatcacgtcaacgtcttactaaatacacaatggcagacctcgtctatgctttaaggcattttgatgaaggtaattgtgacacattaaaagaaatacttgtcacatacaattgttgtgatgatgattatttcaataaaaaggactggtatgattttgtagaaaacccagatatattacgcgtatacgccaacttaggtgaacgtgtacgccaagctttgttaaaaacagtacaattctgtgatgccatgcgaaatgctggtattgttggtgtactgacattagataatcaagatctcaatggtaactggtatgatttcggtgatttcatacaaaccacgccaggtagtggagttcctgttgtagattcttattattcattgttaatgcctatattaaccttgaccagggctttaactgcagagtcacatgttgacactgacttaacaaagccttacattaagtgggatttgttaaaatatgacttcacggaagagaggttaaaactctttgaccgttattttaaatattgggatcagacataccacccaaattgtgttaactgtttggatgacagatgcattctgcattgtgcaaactttaatgttttattctctacagtgttcccacctacaagttttggaccactagtgagaaaaatatttgttgatggtgttccatttgtagtttcaactggataccacttcagagagctaggtgttgtacataatcaggatgtaaacttacatagctctagacttagttttaaggaattacttgtgtatgctgctgaccctgctatgcacgctgcttctggtaatctattactagataaacgcactacgtgcttttcagtagctgcacttactaacaatgttgcttttcaaactgtcaaacccggtaattttaacaaagacttctatgactttgctgtgtctaagggtttctttaaggaaggaagttctgttgaattaaaacacttcttctttgctcaggatggtaatgctgctatcagcgattatgactactatcgttataatctaccaacaatgtgtgatatcagacaactactatttgtagttgaagttgttgataagtactttgattgttacgatggtggctgtattaatgctaaccaagtcatcgtcaacaacctagacaaatcagctggttttccatttaataaatggggtaaggctagactttattatgattcaatgagttatgaggatcaagatgcacttttcgcatatacaaaacgtaatgtcatccctactataactcaaatgaatcttaagtatgccattagtgcaaagaatagagctcgcaccgtagctggtgtctctatctgtagtactatgaccaatagacagtttcatcaaaaattattgaaatcaatagccgccactagaggagctactgtagtaattggaacaagcaaattctatggtggttggcacaacatgttaaaaactgtttatagtgatgtagaaaaccctcaccttatgggttgggattatcctaaatgtgatagagccatgcctaacatgcttagaattatggcctcacttgttcttgctcgcaaacatacaacgtgttgtagcttgtcacaccgtttctatagattagctaatgagtgtgctcaagtattgagtgaaatggtcatgtgtggcggttcactatatgttaaaccaggtggaacctcatcaggagatgccacaactgcttatgctaatagtgtttttaacatttgtcaagctgtcacggccaatgttaatgcacttttatctactgatggtaacaaaattgccgataagtatgtccgcaatttacaacacagactttatgagtgtctctatagaaatagagatgttgacacagactttgtgaatgagttttacgcatatttgcgtaaacatttctcaatgatgatactctctgacgatgctgttgtgtgtttcaatagcacttatgcatctcaaggtctagtggctagcataaagaactttaagtcagttctttattatcaaaacaatgtttttatgtctgaagcaaaatgttggactgagactgaccttactaaaggacctcatgaattttgctctcaacatacaatgctagttaaacagggtgatgattatgtgtaccttccttacccagatccatcaagaatcctaggggccggctgttttgtagatgatatcgtaaaaacagatggtacacttatgattgaacggttcgtgtctttagctatagatgcttacccacttactaaacatcctaatcaggagtatgctgatgtctttcatttgtacttacaatacataagaaagctacatgatgagttaacaggacacatgttagacatgtattctgttatgcttactaatgataacacttcaaggtattgggaacctgagttttatgaggctatgtacacaccgcatacagtcttacaggctgttggggcttgtgttctttgcaattcacagacttcattaagatgtggtgcttgcatacgtagaccattcttatgttgtaaatgctgttacgaccatgtcatatcaacatcacataaattagtcttgtctgttaatccgtatgtttgcaatgctccaggttgtgatgtcacagatgtgactcaactttacttaggaggtatgagctattattgtaaatcacataaaccacccattagttttccattgtgtgctaatggacaagtttttggtttatataaaaatacatgtgttggtagcgataatgttactgactttaatgcaattgcaacatgtgactggacaaatgctggtgattacattttagctaacacctgtactgaaagactcaagctttttgcagcagaaacgctcaaagctactgaggagacatttaaactgtcttatggtattgctactgtacgtgaagtgctgtctgacagagaattacatctttcatgggaagttggtaaacctagaccaccacttaaccgaaattatgtctttactggttatcgtgtaactaaaaacagtaaagtacaaataggagagtacacctttgaaaaaggtgactatggtgatgctgttgtttaccgaggtacaacaacttacaaattaaatgttggtgattattttgtgctgacatcacatacagtaatgccattaagtgcacctacactagtgccacaagagcactatgttagaattactggcttatacccaacactcaatatctcagatgagttttctagcaatgttgcaaattatcaaaaggttggtatgcaaaagtattctacactccagggaccacctggtactggtaagagtcattttgctattggcctagctctctactacccttctgctcgcatagtgtatacagcttgctctcatgccgctgttgatgcactatgtgagaaggcattaaaatatttgcctatagataaatgtagtagaattatacctgcacgtgctcgtgtagagtgttttgataaattcaaagtgaattcaacattagaacagtatgtcttttgtactgtaaatgcattgcctgagacgacagcagatatagttgtctttgatgaaatttcaatggccacaaattatgatttgagtgttgtcaatgccagattacgtgctaagcactatgtgtacattggcgaccctgctcaattacctgcaccacgcacattgctaactaagggcacactagaaccagaatatttcaattcagtgtgtagacttatgaaaactataggtccagacatgttcctcggaacttgtcggcgttgtcctgctgaaattgttgacactgtgagtgctttggtttatgataataagcttaaagcacataaagacaaatcagctcaatgctttaaaatgttttataagggtgttatcacgcatgatgtttcatctgcaattaacaggccacaaataggcgtggtaagagaattccttacacgtaaccctgcttggagaaaagctgtctttatttcaccttataattcacagaatgctgtagcctcaaagattttgggactaccaactcaaactgttgattcatcacagggctcagaatatgactatgtcatattcactcaaaccactgaaacagctcactcttgtaatgtaaacagatttaatgttgctattaccagagcaaaagtaggcatactttgcataatgtctgatagagacctttatgacaagttgcaatttacaagtcttgaaattccacgtaggaatgtggcaactttacaagctgaaaatgtaacaggactctttaaagattgtagtaaggtaatcactgggttacatcctacacaggcacctacacacctcagtgttgacactaaattcaaaactgaaggtttatgtgttgacatacctggcatacctaaggacatgacctatagaagactcatctctatgatgggttttaaaatgaattatcaagttaatggttaccctaacatgtttatcacccgcgaagaagctataagacatgtacgtgcatggattggcttcgatgtcgaggggtgtcatgctactagagaagctgttggtaccaatttacctttacagctaggtttttctacaggtgttaacctagttgctgtacctacaggttatgttgatacacctaataatacagatttttccagagttagtgctaaaccaccgcctggagatcaatttaaacacctcataccacttatgtacaaaggacttccttggaatgtagtgcgtataaagattgtacaaatgttaagtgacacacttaaaaatctctctgacagagtcgtatttgtcttatgggcacatggctttgagttgacatctatgaagtattttgtgaaaataggacctgagcgcacctgttgtctatgtgatagacgtgccacatgcttttccactgcttcagacacttatgcctgttggcatcattctattggatttgattacgtctataatccgtttatgattgatgttcaacaatggggttttacaggtaacctacaaagcaaccatgatctgtattgtcaagtccatggtaatgcacatgtagctagttgtgatgcaatcatgactaggtgtctagctgtccacgagtgctttgttaagcgtgttgactggactattgaatatcctataattggtgatgaactgaagattaatgcggcttgtagaaaggttcaacacatggttgttaaagctgcattattagcagacaaattcccagttcttcacgacattggtaaccctaaagctattaagtgtgtacctcaagctgatgtagaatggaagttctatgatgcacagccttgtagtgacaaagcttataaaatagaagaattattctattcttatgccacacattctgacaaattcacagatggtgtatgcctattttggaattgcaatgtcgatagatatcctgctaattccattgtttgtagatttgacactagagtgctatctaaccttaacttgcctggttgtgatggtggcagtttgtatgtaaataaacatgcattccacacaccagcttttgataaaagtgcttttgttaatttaaaacaattaccatttttctattactctgacagtccatgtgagtctcatggaaaacaagtagtgtcagatatagattatgtaccactaaagtctgctacgtgtataacacgttgcaatttaggtggtgctgtctgtagacatcatgctaatgagtacagattgtatctcgatgcttataacatgatgatctcagctggctttagcttgtgggtttacaaacaatttgatacttataacctctggaacacttttacaagacttcagagtttagaaaatgtggcttttaatgttgtaaataagggacactttgatggacaacagggtgaagtaccagtttctatcattaataacactgtttacacaaaagttgatggtgttgatgtagaattgtttgaaaataaaacaacattacctgttaatgtagcatttgagctttgggctaagcgcaacattaaaccagtaccagaggtgaaaatactcaataatttgggtgtggacattgctgctaatactgtgatctgggactacaaaagagatgctccagcacatatatctactattggtgtttgttctatgactgacatagccaagaaaccaactgaaacgatttgtgcaccactcactgtcttttttgatggtagagttgatggtcaagtagacttatttagaaatgcccgtaatggtgttcttattacagaaggtagtgttaaaggtttacaaccatctgtaggtcccaaacaagctagtcttaatggagtcacattaattggagaagccgtaaaaacacagttcaattattataagaaagttgatggtgttgtccaacaattacctgaaacttactttactcagagtagaaatttacaagaatttaaacccaggagtcaaatggaaattgatttcttagaattagctatggatgaattcattgaacggtataaattagaaggctatgccttcgaacatatcgtttatggagattttagtcatagtcagttaggtggtttacatctactgattggactagctaaacgttttaaggaatcaccttttgaattagaagattttattcctatggacagtacagttaaaaactatttcataacagatgcgcaaacaggttcatctaagtgtgtgtgttctgttattgatttattacttgatgattttgttgaaataataaaatcccaagatttatctgtagtttctaaggttgtcaaagtgactattgactatacagaaatttcatttatgctttggtgtaaagatggccatgtagaaacattttacccaaaattacaatctagtcaagcgtggcaaccgggtgttgctatgcctaatctttacaaaatgcaaagaatgctattagaaaagtgtgaccttcaaaattatggtgatagtgcaacattacctaaaggcataatgatgaatgtcgcaaaatatactcaactgtgtcaatatttaaacacattaacattagctgtaccctataatatgagagttatacattttggtgctggttctgataaaggagttgcaccaggtacagctgttttaagacagtggttgcctacgggtacgctgcttgtcgattcagatcttaatgactttgtctctgatgcagattcaactttgattggtgattgtgcaactgtacatacagctaataaatgggatctcattattagtgatatgtacgaccctaagactaaaaatgttacaaaagaaaatgactctaaagagggttttttcacttacatttgtgggtttatacaacaaaagctagctcttggaggttccgtggctataaagataacagaacattcttggaatgctgatctttataagctcatgggacacttcgcatggtggacagcctttgttactaatgtgaatgcgtcatcatctgaagcatttttaattggatgtaattatcttggcaaaccacgcgaacaaatagatggttatgtcatgcatgcaaattacatattttggaggaatacaaatccaattcagttgtcttcctattctttatttgacatgagtaaatttccccttaaattaaggggtactgctgttatgtctttaaaagaaggtcaaatcaatgatatgattttatctcttcttagtaaaggtagacttataattagagaaaacaacagagttgttatttctagtgatgttcttgttaacaactaaacgaacaatgtttgtttttcttgttttattgccactagtctctagtcagtgtgttaatcttacaaccagaactcaattaccccctgcatacactaattctttcacacgtggtgtttattaccctgacaaagttttcagatcctcagttttacattcaactcaggacttgttcttacctttcttttccaatgttacttggttccatgctatacatgtctctgggaccaatggtactaagaggtttgataaccctgtcctaccatttaatgatggtgtttattttgcttccactgagaagtctaacataataagaggctggatttttggtactactttagattcgaagacccagtccctacttattgttaataacgctactaatgttgttattaaagtctgtgaatttcaattttgtaatgatccatttttgggtgtttattaccacaaaaacaacaaaagttggatggaaagtgagttcagagtttattctagtgcgaataattgcacttttgaatatgtctctcagccttttcttatggaccttgaaggaaaacagggtaatttcaaaaatcttagggaatttgtgtttaagaatattgatggttattttaaaatatattctaagcacacgcctattaatttagtgcgtgatctcccccagggtttttcggctttagaaccattggtagatttgccaataggtattaacatcactaggtttcaaactttacttgctttacatagaagttatttgactcctggtgattcttcttcaggttggacagctggtgctgcagcttattatgtgggttatcttcaacctaggacttttctattaaaatataatgaaaatggaaccattacagatgctgtagactgtgcacttgaccctctctcagaaacaaagtgtacgttgaaatccttcactgtagaaaaaggaatctatcaaacttctaactttagagtccaaccaacagaatctattgttagatttcctaatattacaaacttgtgcccttttggtgaagtttttaacgccaccagatttgcatctgtttatgcttggaacaggaagagaatcagcaactgtgttgctgattattctgtcctatataattccgcatcattttccacttttaagtgttatggagtgtctcctactaaattaaatgatctctgctttactaatgtctatgcagattcatttgtaattagaggtgatgaagtcagacaaatcgctccagggcaaactggaaagattgctgattataattataaattaccagatgattttacaggctgcgttatagcttggaattctaacaatcttgattctaaggttggtggtaattataattacctgtatagattgtttaggaagtctaatctcaaaccttttgagagagatatttcaactgaaatctatcaggccggtagcacaccttgtaatggtgttgaaggttttaattgttactttcctttacaatcatatggtttccaacccactaatggtgttggttaccaaccatacagagtagtagtactttcttttgaacttctacatgcaccagcaactgtttgtggacctaaaaagtctactaatttggttaaaaacaaatgtgtcaatttcaacttcaatggtttaacaggcacaggtgttcttactgagtctaacaaaaagtttctgcctttccaacaatttggcagagacattgctgacactactgatgctgtccgtgatccacagacacttgagattcttgacattacaccatgttcttttggtggtgtcagtgttataacaccaggaacaaatacttctaaccaggttgctgttctttatcaggatgttaactgcacagaagtccctgttgctattcatgcagatcaacttactcctacttggcgtgtttattctacaggttctaatgtttttcaaacacgtgcaggctgtttaataggggctgaacatgtcaacaactcatatgagtgtgacatacccattggtgcaggtatatgcgctagttatcagactcagactaattctcctcggcgggcacgtagtgtagctagtcaatccatcattgcctacactatgtcacttggtgcagaaaattcagttgcttactctaataactctattgccatacccacaaattttactattagtgttaccacagaaattctaccagtgtctatgaccaagacatcagtagattgtacaatgtacatttgtggtgattcaactgaatgcagcaatcttttgttgcaatatggcagtttttgtacacaattaaaccgtgctttaactggaatagctgttgaacaagacaaaaacacccaagaagtttttgcacaagtcaaacaaatttacaaaacaccaccaattaaagattttggtggttttaatttttcacaaatattaccagatccatcaaaaccaagcaagaggtcatttattgaagatctacttttcaacaaagtgacacttgcagatgctggcttcatcaaacaatatggtgattgccttggtgatattgctgctagagacctcatttgtgcacaaaagtttaacggccttactgttttgccacctttgctcacagatgaaatgattgctcaatacacttctgcactgttagcgggtacaatcacttctggttggacctttggtgcaggtgctgcattacaaataccatttgctatgcaaatggcttataggtttaatggtattggagttacacagaatgttctctatgagaaccaaaaattgattgccaaccaatttaatagtgctattggcaaaattcaagactcactttcttccacagcaagtgcacttggaaaacttcaagatgtggtcaaccaaaatgcacaagctttaaacacgcttgttaaacaacttagctccaattttggtgcaatttcaagtgttttaaatgatatcctttcacgtcttgacaaagttgaggctgaagtgcaaattgataggttgatcacaggcagacttcaaagtttgcagacatatgtgactcaacaattaattagagctgcagaaatcagagcttctgctaatcttgctgctactaaaatgtcagagtgtgtacttggacaatcaaaaagagttgatttttgtggaaagggctatcatcttatgtccttccctcagtcagcacctcatggtgtagtcttcttgcatgtgacttatgtccctgcacaagaaaagaacttcacaactgctcctgccatttgtcatgatggaaaagcacactttcctcgtgaaggtgtctttgtttcaaatggcacacactggtttgtaacacaaaggaatttttatgaaccacaaatcattactacagacaacacatttgtgtctggtaactgtgatgttgtaataggaattgtcaacaacacagtttatgatcctttgcaacctgaattagactcattcaaggaggagttagataaatattttaagaatcatacatcaccagatgttgatttaggtgacatctctggcattaatgcttcagttgtaaacattcaaaaagaaattgaccgcctcaatgaggttgccaagaatttaaatgaatctctcatcgatctccaagaacttggaaagtatgagcagtatataaaatggccatggtacatttggctaggttttatagctggcttgattgccatagtaatggtgacaattatgctttgctgtatgaccagttgctgtagttgtctcaagggctgttgttcttgtggatcctgctgcaaatttgatgaagacgactctgagccagtgctcaaaggagtcaaattacattacacataaacgaacttatggatttgtttatgagaatcttcacaattggaactgtaactttgaagcaaggtgaaatcaaggatgctactccttcagattttgttcgcgctactgcaacgataccgatacaagcctcactccctttcggatggcttattgttggcgttgcacttcttgctgtttttcagagcgcttccaaaatcataaccctcaaaaagagatggcaactagcactctccaagggtgttcactttgtttgcaacttgctgttgttgtttgtaacagtttactcacaccttttgctcgttgctgctggccttgaagccccttttctctatctttatgctttagtctacttcttgcagagtataaactttgtaagaataataatgaggctttggctttgctggaaatgccgttccaaaaacccattactttatgatgccaactattttctttgctggcatactaattgttacgactattgtataccttacaatagtgtaacttcttcaattgtcattacttcaggtgatggcacaacaagtcctatttctgaacatgactaccagattggtggttatactgaaaaatgggaatctggagtaaaagactgtgttgtattacacagttacttcacttcagactattaccagctgtactcaactcaattgagtacagacactggtgttgaacatgttaccttcttcatctacaataaaattgttgatgagcctgaagaacatgtccaaattcacacaatcgacggttcatccggagttgttaatccagtaatggaaccaatttatgatgaaccgacgacgactactagcgtgcctttgtaagcacaagctgatgagtacgaacttatgtactcattcgtttcggaagagacaggtacgttaatagttaatagcgtacttctttttcttgctttcgtggtattcttgctagttacactagccatccttactgcgcttcgattgtgtgcgtactgctgcaatattgttaacgtgagtcttgtaaaaccttctttttacgtttactctcgtgttaaaaatctgaattcttctagagttcctgatcttctggtctaaacgaactaaatattatattagtttttctgtttggaactttaattttagccatggcagattccaacggtactattaccgttgaagagcttaaaaagctccttgaacaatggaacctagtaataggtttcctattccttacatggatttgtcttctacaatttgcctatgccaacaggaataggtttttgtatataattaagttaattttcctctggctgttatggccagtaactttagcttgttttgtgcttgctgctgtttacagaataaattggatcaccggtggaattgctatcgcaatggcttgtcttgtaggcttgatgtggctcagctacttcattgcttctttcagactgtttgcgcgtacgcgatccatgtggtcattcaatccagaaactaacattcttctcaacgtgccactccatggcactattctgaccagaccgcttctagaaagtgaactcgtaatcggagctgtgatccttcgtggacatcttcgtattgctggacaccatctaggacgctgtgacatcaaggacctgcctaaagaaatcactgttgctacatcacgaacgctttcttattacaaattgggagcttcgcagcgtgtagcaggtgactcaggttttgctgcatacagtcgctacaggattggcaactataaattaaacacagaccattccagtagcagtgacaatattgctttgcttgtacagtaagtgacaacagatgtttcatctcgttgactttcaggttactatagcagagatattactaattattatgaggacttttaaagtttccatttggaatcttgattacatcataaacctcataattaaaaatttatctaagtcactaactgagaataaatattctcaattagatgaagagcaaccaatggagattgattaaacgaacatgaaaattattcttttcttggcactgataacactcgctacttgtgagctttatcactaccaagagtgtgttagaggtacaacagtacttttaaaagaaccttgctcttctggaacatacgagggcaattcaccatttcatcctctagctgataacaaatttgcactgacttgctttagcactcaatttgcttttgcttgtcctgacggcgtaaaacacgtctatcagttacgtgccagatcagtttcacctaaactgttcatcagacaagaggaagttcaagaactttactctccaatttttcttattgttgcggcaatagtgtttataacactttgcttcacactcaaaagaaagacagaatgattgaactttcattaattgacttctatttgtgctttttagcctttctgctattccttgttttaattatgcttattatcttttggttctcacttgaactgcaagatcataatgaaacttgtcacgcctaaacgaacatgaaatttcttgttttcttaggaatcatcacaactgtagctgcatttcaccaagaatgtagtttacagtcatgtactcaacatcaaccatatgtagttgatgacccgtgtcctattcacttctattctaaatggtatattagagtaggagctagaaaatcagcacctttaattgaattgtgcgtggatgaggctggttctaaatcacccattcagtacatcgatatcggtaattatacagtttcctgtttaccttttacaattaattgccaggaacctaaattgggtagtcttgtagtgcgttgttcgttctatgaagactttttagagtatcatgacgttcgtgttgttttagatttcatctaaacgaacaaactaaaatgtctgataatggaccccaaaatcagcgaaatgcaccccgcattacgtttggtggaccctcagattcaactggcagtaaccagaatggagaacgcagtggggcgcgatcaaaacaacgtcggccccaaggtttacccaataatactgcgtcttggttcaccgctctcactcaacatggcaaggaagaccttaaattccctcgaggacaaggcgttccaattaacaccaatagcagtccagatgaccaaattggctactaccgaagagctaccagacgaattcgtggtggtgacggtaaaatgaaagatctcagtccaagatggtatttctactacctaggaactgggccagaagctggacttccctatggtgctaacaaagacggcatcatatgggttgcaactgagggagccttgaatacaccaaaagatcacattggcacccgcaatcctgctaacaatgctgcaatcgtgctacaacttcctcaaggaacaacattgccaaaaggcttctacgcagaagggagcagaggcggcagtcaagcctcttctcgttcctcatcacgtagtcgcaacagttcaagaaattcaactccaggcagcagtaggggaacttctcctgctagaatggctggcaatggcggtgatgctgctcttgctttgctgctgcttgacagattgaaccagcttgagagcaaaatgtctggtaaaggccaacaacaacaaggccaaactgtcactaagaaatctgctgctgaggcttctaagaagcctcggcaaaaacgtactgccactaaagcatacaatgtaacacaagctttcggcagacgtggtccagaacaaacccaaggaaattttggggaccaggaactaatcagacaaggaactgattacaaacattggccgcaaattgcacaatttgcccccagcgcttcagcgttcttcggaatgtcgcgcattggcatggaagtcacaccttcgggaacgtggttgacctacacaggtgccatcaaattggatgacaaagatccaaatttcaaagatcaagtcattttgctgaataagcatattgacgcatacaaaacattcccaccaacagagcctaaaaaggacaaaaagaagaaggctgatgaaactcaagccttaccgcagagacagaagaaacagcaaactgtgactcttcttcctgctgcagatttggatgatttctccaaacaattgcaacaatccatgagcagtgctgactcaactcaggcctaaactcatgcagaccacacaaggcagatgggctatataaacgttttcgcttttccgtttacgatatatagtctactcttgtgcagaatgaattctcgtaactacatagcacaagtagatgtagttaactttaatctcacatagcaatctttaatcagtgtgtaacattagggaggacttgaaagagccaccacattttcaccgaggccacgcggagtacgatcgagtgtacagtgaacaatgctagggagagctgcctatatggaagagccctaatgtgtaaaattaattttagtagtgctatccccatgtgattttaatagcttcttaggagaatgacaaaaaaaaaaaaaaaaaaaaaaaaaaaaaaaaaaaaaaaaaaaaaaaaaaaaaaaaaaagggtcggcatggcatctccacctcctcgcggtccgacctgggcatccgaaggaggacgcacgtccactcggatggctaagggagcagcacactggcggccgttactagggccgcgcccttcccaacagttgcgcagcctgaatggcgaatggagatccaatttttaagtgtataatgtgttaaactactgattctaattgtttgtgtattttagattcacagtcccaaggctcatttcaggcccctcagtcctcacagtctgttcatgatcataatcagccataccacatttgtagaggttttacttgctttaaaaaacctcccacacctccccctgaacctgaaacataaaatgaatgcaattgttgttgttaacttgtttattgcagcttataatggttacaaataaagcaatagcatcacaaatttcacaaataaagcatttttttcactgcattctagttgtggtttgtccaaactcatcaatgtatcttaaagcttgagtattctatagtctcacctaaatagcttggcgtaatcatggtcatagctgtttcctgtgtgaaattgttatccgctcacaattccacacaacatacgagccggaagcataaagtgtaaagcctggggtgcctaatgagtgagctaactcacattaattgcgttgcgctcactgcccgctttccagtcgggaaacctgtcgtgccagctgcattaatgaatcggccaacgcgaaccccttgcggccgcccgggccgtcgaccaattctcatgtttgacagcttatcatcgaatttctgccattcatccgcttattatcacttattcaggcgtagcaaccaggcgtttaagggcaccaataactgccttaaaaaaattacgccccgccctgccactcatcgcagtactgttgtaattcattaagcattctgccgacatggaagccatcacaaacggcatgatgaacctgaatcgccagcggcatcagcaccttgtcgccttgcgtataatatttgcccatggtgaaaacgggggcgaagaagttgtccatattggccacgtttaaatcaaaactggtgaaactcacccagggattggctgagacgaaaaacatattctcaataaaccctttagggaaataggccaggttttcaccgtaacacgccacatcttgcgaatatatgtgtagaaactgccggaaatcgtcgtggtattcactccagagcgatgaaaacgtttcagtttgctcatggaaaacggtgtaacaagggtgaacactatcccatatcaccagctcaccgtctttcattgccatacgaaattccggatgagcattcatcaggcgggcaagaatgtgaataaaggccggataaaacttgtgcttatttttctttacggtctttaaaaaggccgtaatatccagctgaacggtctggttataggtacattgagcaactgactgaaatgcctcaaaatgttctttacgatgccattgggatatatcaacggtggtatatccagtgatttttttctccattttagcttccttagctcctgaaaatctcgataactcaaaaaatacgcccggtagtgatcttatttcattatggtgaaagttggaacctcttacgtgccgatcaacgtctcattttcgccaaaagttggcccagggcttcccggtatcaacagggacaccaggatttatttattctgcgaagtgatcttccgtcacaggtatttattcgcgataagctcatggagcggcgtaaccgtcgcacaggaaggacagagaaagcgcggatctgggaagtgacggacagaacggtcaggacctggattggggaggcggttgccgccgctgctgctgacggtgtgacgttctctgttccggtcacaccacatacgttccgccattcctatgcgatgcacatgctgtatgccggtataccgctgaaagttctgcaaagcctgatgggacataagtccatcagttcaacggaagtctacacgaaggtttttgcgctggatgtggctgcccggcaccgggtgcagtttgcgatgccggagtctgatgcggttgcgatgctgaaacaattatcctgagaataaatgccttggcctttatatggaaatgtggaactgagtggatatgctgtttttgtctgttaaacagagaagctggctgttatccactgagaagcgaacgaaacagtcgggaaaatctcccattatcgtagagatccgcattattaatctcaggagcctgtgtagcgtttataggaagtagtgttctgtcatgatgcctgcaagcggtaacgaaaacgatttgaatatgccttcaggaacaatagaaatcttcgtgcggtgttacgttgaagtggagcggattatgtcagcaatggacagaacaacctaatgaacacagaaccatgatgtggtctgtccttttacagccagtagtgctcgccgcagtcgagcgacagggcgaagccctcggctggttgccctcgccgctgggctggcggccgtctatggccctgcaaacgcgccagaaacgccgtcgaagccgtgtgcgagacaccgcggccggccgccggcgttgtggatacctcgcggaaaacttggccctcactgacagatgaggggcggacgttgacacttgaggggccgactcacccggcgcggcgttgacagatgaggggcaggctcgatttcggccggcgacgtggagctggccagcctcgcaaatcggcgaaaacgcctgattttacgcgagtttcccacagatgatgtggacaagcctggggataagtgccctgcggtattgacacttgaggggcgcgactactgacagatgaggggcgcgatccttgacacttgaggggcagagtgctgacagatgaggggcgcacctattgacatttgaggggctgtccacaggcagaaaatccagcatttgcaagggtttccgcccgtttttcggccaccgctaacctgtcttttaacctgcttttaaaccaatatttataaaccttgtttttaaccagggctgcgccctgtgcgcgtgaccgcgcacgccgaaggggggtgcccccccttctcgaaccctcccggtcgagtgagcgaggaagcaccagggaacagcacttatatattctgcttacacacgatgcctgaaaaaacttcccttggggttatccacttatccacggggatatttttataattattttttttatagtttttagatcttcttttttagagcgccttgtaggcctttatccatgctggttctagagaaggtgttgtgacaaattgccctttcagtgtgacaaatcaccctcaaatgacagtcctgtctgtgacaaattgcccttaaccctgtgacaaattgccctcagaagaagctgttttttcacaaagttatccctgcttattgactcttttttatttagtgtgacaatctaaaaacttgtcacacttcacatggatctgtcatggcggaaacagcggttatcaatcacaagaaacgtaaaaatagcccgcgaatcgtccagtcaaacgacctcactgaggcggcatatagtctctcccgggatcaaaaacgtatgctgtatctgttcgttgaccagatcagaaaatctgatggcaccctacaggaacatgacggtatctgcgagatccatgttgctaaatatgctgaaatattcggattgacctctgcggaagccagtaaggatatacggcaggcattgaagagtttcgcggggaaggaagtggttttttatcgccctgaagaggatgccggcgatgaaaaaggctatgaatcttttccttggtttatcaaacgtgcgcacagtccatccagagggctttacagtgtacatatcaacccatatctcattcccttctttatcgggttacagaaccggtttacgcagtttcggcttagtgaaacaaaagaaatcaccaatccgtatgccatgcgtttatacgaatccctgtgtcagtatcgtaagccggatggctcaggcatcgtctctctgaaaatcgactggatcatagagcgttaccagctgcctcaaagttaccagcgtatgcctgacttccgccgccgcttcctgcaggtctgtgttaatgagatcaacagcagaactccaatgcgcctctcatacattgagaaaaagaaaggccgccagacgactcatatcgtattttccttccgcgatatcacttccatgacgacaggatagtctgagggttatctgtcacagatttgagggtggttcgtcacatttgttctgacctactgagggtaatttgtcacagttttgctgtttccttcagcctgcatggattttctcatactttttgaactgtaatttttaaggaagccaaatttgagggcagtttgtcacagttgatttccttctctttcccttcgtcatgtgacctgatatcgggggttagttcgtcatcattgatgagggttgattatcacagtttattactctgaattggctatccgcgtgtgtacctctacctggagtttttcccacggtggatatttcttcttgcgctgagcgtaagagctatctgacagaacagttcttctttgcttcctcgccagttcgctcgctatgctcggttacacggctgcggcg

SEQ ID NO: 10 - DNA, 35283 bp, Artificial Sequence
  Clone pCCI-4K-SARS-CoV-2-DWDDW. Based on SARS-CoV-2.
gatgtgctgcaaggcgattaagttgggtaacgccagggttttcccagtcacgacgttgtaaaacgacggccagtgaattgtaatacgactcactatagggcgaattctagttattaatagtaatcaattacggggtcattagttcatagcccatatatggagttccgcgttacataacttacggtaaatggcccgcctggctgaccgcccaacgacccccgcccattgacgtcaataatgacgtatgttcccatagtaacgccaatagggactttccattgacgtcaatgggtggagtatttacggtaaactgcccacttggcagtacatcaagtgtatcatatgccaagtacgccccctattgacgtcaatgacggtaaatggcccgcctggcattatgcccagtacatgaccttatgggactttcctacttggcagtacatctacgtattagtcatcgctattaccatggtgatgcggttttggcagtacatcaatgggcgtggatagcggtttgactcacggggatttccaagtctccaccccattgacgtcaatgggagtttgttttggcaccaaaatcaacgggactttccaaaatgtcgtaacaactccgccccattgacgcaaatgggcggtaggcgtgtacggtgggaggtctatataagcagagctggtttagtgaaccgtattaaaggtttataccttcccaggtaacaaaccaaccaactttcgatctcttgtagatctgttctctaaacgaactttaaaatctgtgtggctgtcactcggctgcatgcttagtgcactcacgcagtataattaataactaattactgtcgttgacaggacacgagtaactcgtctatcttctgcaggctgcttacggtttcgtccgtgttgcagccgatcatcagcacatctaggtttcgtccgggtgtgaccgaaaggtaagatggagagccttgtccctggtttcaacgagaaaacacacgtccaactcagtttgcctgttttacaggttcgcgacgtgctcgtacgtggctttggagactccgtggaggaggtcttatcagaggcacgtcaacatcttaaagatggcacttgtggcttagtagaagttgaaaaaggcgttttgcctcaacttgaacagccctatgtgttcatcaaacgttcggatgctcgaactgcacctcatggtcatgttatggttgagctggtagcagaactcgaaggcattcagtacggtcgtagtggtgagacacttggtgtccttgtccctcatgtgggcgaaataccagtggcttaccgcaaggttcttcttcgtaagaacggtaataaaggagctggtggccatagttacggcgccgatctaaagtcatttgacttaggcgacgagcttggcactgatccttatgaagattttcaagaaaactggaacactaaacatagcagtggtgttacccgtgaactcatgcgtgagcttaacggaggggcatacactcgctatgtcgataacaacttctgtggccctgatggctaccctcttgagtgcattaaagaccttctagcacgtgctggtaaagcttcatgcactttgtccgaacaactggactttattgacactaagaggggtgtatactgctgccgtgaacatgagcatgaaattgcttggtacacggaacgttctgaaaagagctatgaattgcagacaccttttgaaattaaattggcaaagaaatttgacaccttcaatggggaatgtccaaattttgtatttcccttaaattccataatcaagactattcaaccaagggttgaaaagaaaaagcttgatggctttatgggtagaattcgatctgtctatccagttgcgtcaccaaatgaatgcaaccaaatgtgcctttcaactctcatgaagtgtgatcattgtggtgaaacttcatggcagacgggcgattttgttaaagccacttgcgaattttgtggcactgagaatttgactaaagaaggtgccactacttgtggttacttaccccaaaatgctgttgttaaaatttattgtccagcatgtcacaattcagaagtaggacctgagcatagtcttgccgaataccataatgaatctggcttgaaaaccattcttcgtaagggtggtcgcactattgcctttggaggctgtgtgttctcttatgttggttgccataacaagtgtgcctattgggtcccgcgtgcgagtgcgaacataggttgtaatcatacgggtgtagtaggtgaaggttcggaaggtctaaatgataatctactagaaatactacaaaaagaaaaagtaaatataaatatagtaggtgattttaaactaaatgaagaaatagcgataatattagcgtcgttttcggcgtcgacgagtgcgtttgtagaaacggtaaaaggtttagattataaagcgtttaaacaaatagtagaatcgtgtggtaattttaaagtgacgaaaggtaaagcgaaaaaaggtgcgtggaatataggtgaacaaaaatcgatactaagtccgctatatgcgtttgcgtcggaagcggcgcgtgtagtacgttcgatattttcgcgtacgctagaaacggcgcaaaattcggtacgtgtattacaaaaagcggcgataacgatactagatggtatatcgcaatattcgctacgtctaatagatgcgatgatgtttacgtcggatttagcgacgaataatctagtagtaatggcgtatataacgggtggtgtagtacaattaacgtcgcaatggctaacgaatatatttggtacggtatatgaaaaactaaaaccggtactagattggctagaagaaaaatttaaagaaggtgtagaatttctacgtgatggttgggaaatagtaaaatttatatcgacgtgtgcgtgtgaaatagtaggtggtcaaatagtaacgtgtgcgaaagaaataaaagaatcggtacaaacgttttttaaactagtaaataaatttctagcgctatgtgcggattcgataataataggtggtgcgaaactaaaagcgctaaatctaggtgaaacgtttgtgacgcattcgaaaggtttatatcgtaaatgtgtaaaatcgcgtgaagaaacgggtctactaatgccgctaaaagcgccgaaagaaataatatttttagaaggtgaaacgctaccgacggaagtattaacggaagaagtagtattaaaaacgggtgatttacaaccgttagaacaaccgacgtcggaagcggtagaagcgccgttagtaggtacgccggtatgtataaatggtctaatgttactagaaataaaagatacggaaaaatattgtgcgctagcgccgaatatgatggtaacgaataatacgtttacgctaaaaggtggtgcgccgacgaaagtaacgtttggtgatgatacggtaatagaagtacaaggttataaatcggtaaatataacgtttgaactagatgaacgtatagataaagtactaaatgaaaaatgttcggcgtatacggtagaactaggtacggaagtaaatgaatttgcgtgtgtagtagcggatgcggtaataaaaacgttacaaccggtatcggaattactaacgccgctaggtatagatttagatgaatggtcgatggcgacgtattatttatttgatgaatcgggtgaatttaaattagcgtcgcatatgtattgttcgttttatccgccggatgaagatgaagaagaaggtgattgtgaagaagaagaatttgaaccgtcgacgcaatatgaatatggtacggaagatgattatcaaggtaaaccgttagaatttggtgcgacgtcggcggcgctacaaccggaagaagaacaagaagaagattggttggatgatgattcgcaacaaacggtaggtcaacaagatggttcggaagataatcaaacgacgacgatacaaacgatagtagaagtacaaccgcaattagaaatggaactaacgccggtagtacaaacgatagaagtaaattcgttttcgggttatttaaaactaacggataatgtatatataaaaaatgcggatatagtagaagaagcgaaaaaagtaaaaccgacggtagtagtaaatgcggcgaatgtatatctaaaacatggtggtggtgtagcgggtgcgttaaataaagcgacgaataatgcgatgcaagtagaatcggatgattatatagcgacgaatggtccgctaaaagtaggtggttcgtgtgtattatcgggtcataatctagcgaaacattgtctacatgtagtaggtccgaatgtaaataaaggtgaagatatacaactactaaaatcggcgtatgaaaattttaatcaacatgaagtactactagcgccgttattatcggcgggtatatttggtgcggacccgatacattcgttacgtgtgtgtgtagatacggtacgcacgaatgtatatttagcggtatttgataaaaatctatatgataaactagtatcgtcgtttttagaaatgaaatcggaaaaacaagtagaacaaaaaatagcggaaataccgaaagaagaagtaaaaccgtttataacggaatcgaaaccgtcggtagaacaacgtaaacaagatgataaaaaaataaaagcgtgtgtagaagaagtaacgacgacgctagaagaaacgaaatttctaacagaaaatttattactatatatagatataaatggtaatctacatccggattcggcgacgctagtatcggatatagatataacgtttttaaaaaaagatgcgccgtatatagtaggtgatgtagtacaagaaggtgtattaacggcggtagtaataccgacgaaaaaagcgggtggtacgacggaaatgctggcgaaagcgttacgtaaagtaccgacggataattatataacgacgtacccgggtcagggtttaaatggttacactgtagaggaggcaaagacagtgcttaaaaagtgtaaaagtgccttttacattctaccatctattatctctaatgagaagcaagaaattcttggaactgtttcttggaatttgcgagaaatgcttgcacatgcagaagaaacacgcaaattaatgcctgtctgtgtggaaactaaagccatagtttcaactatacagcgtaaatataagggtattaaaatacaagagggtgtggttgattatggtgctagattttacttttacaccagtaaaacaactgtagcgtcacttatcaacacacttaacgatctaaatgaaactcttgttacaatgccacttggctatgtaacacatggcttaaatttggaagaagctgctcggtatatgagatctctcaaagtgccagctacagtttctgtttcttcacctgatgctgttacagcgtataatggttatcttacttcttcttctaaaacacctgaagaacattttattgaaaccatctcacttgctggttcctataaagattggtcctattctggacaatctacacaactaggtatagaatttcttaagagaggtgataaaagtgtatattacactagtaatcctaccacattccacctagatggtgaagttatcacctttgacaatcttaagacacttctttctttgagagaagtgaggactattaaggtgtttacaacagtagacaacattaacctccacacgcaagttgtggacatgtcaatgacatatggacaacagtttggtccaacttatttggatggagctgatgttactaaaataaaacctcataattcacatgaaggtaaaacattttatgttttacctaatgatgacactctacgtgttgaggcttttgagtactaccacacaactgatcctagttttctgggtaggtacatgtcagcattaaatcacactaaaaagtggaaatacccacaagttaatggtttaacttctattaaatgggcagataacaactgttatcttgccactgcattgttaacactccaacaaatagagttgaagtttaatccacctgctctacaagatgcttattacagagcaagggctggtgaagctgctaacttttgtgcacttatcttagcctactgtaataagacagtaggtgagttaggtgatgttagagaaacaatgagttacttgtttcaacatgccaatttagattcttgcaaaagagtcttgaacgtggtgtgtaaaacttgtggacaacagcagacaacccttaagggtgtagaagctgttatgtacatgggcacactttcttatgaacaatttaagaaaggtgttcagataccttgtacgtgtggtaaacaagctacaaaatatctagtacaacaggagtcaccttttgttatgatgtcagcaccacctgctcagtatgaacttaagcatggtacatttacttgtgctagtgagtacactggtaattaccagtgtggtcactataaacatataacttctaaagaaactttgtattgcatagacggtgctttacttacaaagtcctcagaatacaaaggtcctattacggatgttttctacaaagaaaacagttacacaacaaccataaaaccagttacttataaattggatggtgttgtttgtacagaaattgaccctaagttggacaattattataagaaagacaattcttatttcacagagcaaccaattgatcttgtaccaaaccaaccatatccaaacgcaagcttcgataattttaagtttgtatgtgataatatcaaatttgctgatgatttaaaccagttaactggttataagaaacctgcttcaagagagcttaaagttacatttttccctgacttaaatggtgatgtggtggctattgattataaacactacacaccctcttttaagaaaggagctaaattgttacataaacctattgtttggcatgttaacaatgcaactaataaagccacgtataaaccaaatacctggtgtatacgttgtctttggagcacaaaaccagttgaaacatcaaattcgtttgatgtactgaagtcagaggacgcgcagggaatggataatcttgcctgcgaagatctaaaaccagtctctgaagaagtagtggaaaatcctaccatacagaaagacgttcttgagtgtaatgtgaaaactaccgaagttgtaggagacattatacttaaaccagcaaataatagtttaaaaattacagaagaggttggccacacagatctaatggctgcttatgtagacaattctagtcttactattaagaaacctaatgaattatctagagtattaggtttgaaaacccttgctactcatggtttagctgctgttaatagtgtcccttgggatactatagctaattatgctaagccttttcttaacaaagttgttagtacaactactaacatagttacacggtgtttaaaccgtgtttgtactaattatatgccttatttctttactttattgctacaattgtgtacttttactagaagtacaaattctagaattaaagcatctatgccgactactatagcaaagaatactgttaagagtgtcggtaaattttgtctagaggcttcatttaattatttgaagtcacctaatttttctaaactgataaatattataatttggtttttactattaagtgtttgcctaggttcgttaatatattcgacggcggcgttaggtgtattaatgtcgaatttaggtatgccgtcgtattgtacgggttatcgtgaaggttatttaaattcgacgaatgtaacgatagcgacgtattgtacgggttcgataccgtgttcggtatgtctatcgggtttagattcgttagatacgtatccgtcgttagaaacgatacaaataacgatatcgtcgtttaaatgggatttaacggcgtttggtttagtagcggaatggtttttagcgtatatactatttacgcgatttttttatgtactaggtttagcggcgataatgcaattatttttttcgtattttgcggtacattttatttcgaattcgtggctaatgtggttaataataaatctagtacaaatggcgccgatatcggcgatggtacgtatgtatatattttttgcgtcgttttattatgtatggaaatcgtatgtacatgtagtagatggttgtaattcgtcgacgtgtatgatgtgttataaacgtaatcgtgcgacgcgagtagaatgtacgacgatagtaaatggtgtacgtcgttcgttttatgtatatgcgaatggtggtaaaggtttttgtaaactacataattggaattgtgtaaattgtgatacgttttgtgcgggttcgacgtttatatcggatgaagtagcgcgtgatttatcgctacaatttaaacgtccgataaatccgacggatcaatcgtcgtatatagtagattcggtaacggtaaaaaatggttcgatacatctatattttgataaagcgggtcaaaaaacgtatgaacgtcattcgctatcgcattttgtaaatttagataatctacgtgcgaataatacgaaaggttcgttaccgataaatgtaatagtatttgatggtaaatcgaaatgtgaagaatcgtcggcgaaatcggcgtcggtatattattcgcaactaatgtgtcaaccgatactattactagatcaagcgttagtatcggatgtaggtgattcggcggaagtagcggtaaaaatgtttgatgcgtatgtaaatacgttttcgtcgacgtttaatgtaccgatggaaaaactaaaaacgctagtagcgacggcggaagcggaactagcgaaaaatgtatctttagataatgtattatcgacgtttatatcggcggcgcgtcaaggttttgtagattcggatgtagaaacgaaagatgtagtagaatgtctaaaattatcgcatcaatcggatatagaagtaacgggtgattcgtgtaataattatatgctaacgtataataaagtagaaaatatgacgccgcgtgatctaggtgcgtgtatagattgttcggcgcgtcatataaatgcgcaagtagcgaaatcgcataatatagcgttaatatggaatgtaaaagattttatgtcgttatcggaacaactacgtaaacaaatacgttcggcggcgaaaaaaaataatttaccgtttaaattaacgtgtgcgacgacgcgacaagtagtaaatgtagtaacgacgaaaatagcgctaaaaggtggtaaaatagtaaataattggttaaaacaattaattaaagtaacgctagtatttctatttgtagcggcgatattttatttaataacgccggtacatgtaatgtcgaaacatacggatttttcgtcggaaataataggttataaagcgatagatggtggtgtaactcgtgatatagcgtcgacggatacgtgttttgcgaataaacatgcggattttgatacgtggttttcgcaacgtggtggttcgtatacgaatgataaagcgtgtccgttaatagcggcggtaataacacgtgaagtaggttttgtagtaccgggtttaccgggtacgatattacgtacgacgaatggtgattttttacattttttaccgcgtgtattttcggcggtaggtaatatatgttatacgccgtcgaaactaatagaatatacggattttgcgacgtcggcgtgtgtattagcggcggaatgtacgatatttaaagatgcgtcgggtaaaccggtaccgtattgttatgatacgaatgtactagaaggttcggtagcgtatgaatcgttacgcccggatacacgttatgtactaatggatggttcgataatacaatttccgaatacgtatctagaaggttcggtacgtgtagtaacgacgtttgattcggaatattgtcgtcatggtacgtgtgaacgttcggaagcgggtgtatgtgtatcgacgtcggggcgttgggtactaaataatgattattatcgttcgttaccgggtgtattctgtggtgtagatgcggtaaatttactaacgaatatgtttacgccgctgatacaaccgataggtgcgttagatatatcggcgtcgatagtagcgggtggtatagtagcgatagtagtaacgtgtctagcgtattattttatgcgttttcgtcgtgcgtttggtgaatattcgcatgtagtagcgtttaatacgttactatttctaatgtcttttacagtactatgtttaacgccggtatattcttttttaccgggtgtatattcggtaatatatttatatttaacgttttatctaacgaatgatgtatcgtttttagcgcatatacaatggatggtaatgtttacgccgttagtaccgttttggataacaatagcgtatataatatgtatatcgacgaaacatttttattggtttttttcgaattatctgaaacgtcgtgtagtatttaatggtgtatctttttcgacgtttgaagaagcggcgctatgtacatttttattaaataaagaaatgtatctaaaattacgttcggatgtactattaccgctaacgcaatataatcgttatttagcgctatataataaatataaatatttttcgggtgcgatggatacgacgtcgtatcgtgaagcggcgtgttgtcatctagcgaaagcgctaaatgatttttcgaattcgggttcggatgtactatatcaaccgccgcaaacgtcgataacgtcggcggtattacaatcgggttttcgtaaaatggcgtttccgtcgggtaaagtagaaggttgtatggtacaagtaacgtgtggtacgacgacgctaaatggtctatggctagatgatgtagtatattgtccgcgtcatgtaatatgtacgtcggaagatatgctaaatccgaattatgaagatttactaatacgtaaatcgaatcataattttttagtacaagcgggtaatgtacaactacgtgtaataggtcattcgatgcaaaattgtgtactaaaactaaaagtagatacggcgaatccgaaaacaccgaaatataaatttgtacgtatacaaccgggtcaaacgttttcggtattagcgtgttataatggttctccgtcgggtgtatatcaatgtgcgatgcgtccgaattttacgattaaaggttcgtttctaaatggttcgtgtggttcggtaggttttaatatagattatgattgtgtatcgttttgttatatgcatcatatggaattaccgacgggtgtacatgcgggtacggatttagaaggtaatttttatggtccgtttgtagatcgtcaaacagcgcaagcggcgggtacggatacgacgattacggtaaatgtattagcgtggttatatgcggcggtaataaatggtgatcgttggtttctaaatcgttttacgacgacgctaaatgattttaatctagtagcgatgaaatataattatgaaccgctgacacaagatcatgtagatatactaggtccgctatcggcgcaaacgggtatagcggtattagatatgtgtgcgtcgttaaaagaattactacaaaatggtatgaatggtcgtacgatattaggttcggcgttattagaagatgaatttacgccgtttgatgtagtacgtcaatgttcgggtgtaacgtttcaatcggcggtaaaacgtacgataaaaggtacgcatcattggttattactaacgatattaacgtcgctattagtattagtacaatcgacgcaatggtcgttatttttttttttatatgaaaatgcgtttttaccgtttgcgatgggtataatagcgatgtcggcgtttgcgatgatgtttgtaaaacataagcatgcatttctctgtttgtttttgttaccttctcttgccactgtagcttattttaatatggtctatatgcctgctagttgggtgatgcgtattatgacatggttggatatggttgatactagtttgtctggttttaagctaaaagactgtgttatgtatgcatcagctgtagtgttactaatccttatgacagcaagaactgtgtatgatgatggtgctaggagagtgtggacacttatgaatgtcttgacactcgtttataaagtttattatggtaatgctttagatcaagccatttccatgtgggctcttataatctctgttacttctaactactcaggtgtagttacaactgtcatgtttttggccagaggtattgtttttatgtgtgttgagtattgccctattttcttcataactggtaatacacttcagtgtataatgctagtttattgtttcttaggctatttttgtacttgttactttggcctcttttgtttactcaaccgctactttagactgactcttggtgtttatgattacttagtttctacacaggagtttagatatatgaattcacagggactactcccacccaagaatagcatagatgccttcaaactcaacattaaattgttgggtgttggtggcaaaccttgtatcaaagtagccactgtacagtctaaaatgtcagatgtaaagtgcacatcagtagtcttactctcagttttgcaacaactcagagtagaatcatcatctaaattgtgggctcaatgtgtccagttacacaatgacattctcttagctaaagatactactgaagcctttgaaaaaatggtttcactactttctgttttgctttccatgcagggtgctgtagacataaacaagctttgtgaagaaatgctggacaacagggcaaccttacaagctatagcctcagagtttagttcccttccatcatatgcagcttttgctactgctcaagaagcttatgagcaggctgttgctaatggtgattctgaagttgttcttaaaaagttgaagaagtctttgaatgtggctaaatctgaatttgaccgtgatgcagccatgcaacgtaagttggaaaagatggctgatcaagctatgacccaaatgtataaacaggctagatctgaggacaagagggcaaaagttactagtgctatgcagacaatgcttttcactatgcttagaaagttggataatgatgcactcaacaacattatcaacaatgcaagagatggttgtgttcccttgaacataatacctcttacaacagcagccaaactaatggttgtcataccagactataacacatataaaaatacgtgtgatggtacaacatttacttatgcatcagcattgtgggaaatccaacaggttgtagatgcagatagtaaaattgttcaacttagtgaaattagtatggacaattcacctaatttagcatggcctcttattgtaacagctttaagggccaattctgctgtcaaattacagaataatgagcttagtcctgttgcactacgacagatgtcttgtgctgccggtactacacaaactgcttgcactgatgacaatgcgttagcttactacaacacaacaaagggaggtaggtttgtacttgcactgttatccgatttacaggatttgaaatgggctagattccctaagagtgatggaactggtactatctatacagaactggaaccaccttgtaggtttgttacagacacacctaaaggtcctaaagtgaagtatttatactttattaaaggattaaacaacctaaatagaggtatggtacttggtagtttagctgccacagtacgtctacaagctggtaatgcaacagaagtgcctgccaattcaactgtattatctttctgtgcttttgctgtagatgctgctaaagcttacaaagattatctagctagtgggggacaaccaatcactaattgtgttaagatgttgtgtacacacactggtactggtcaggcaataacagttacaccggaagccaatatggatcaagaatcctttggtggtgcatcgtgttgtctgtactgccgttgccacatagatcatccaaatcctaaaggattttgtgacttaaaaggtaagtatgtacaaatacctacaacttgtgctaatgaccctgtgggttttacacttaaaaacacagtctgtaccgtctgcggtatgtggaaaggttatggctgtagttgtgatcaactccgcgaacccatgcttcagtcagctgatgcacaatcgtttttaaacgggtttgcggtgtaagtgcagcccgtcttacaccgtgcggcacaggcactagtactgatgtcgtatacagggcttttgacatctacaatgataaagtagctggttttgctaaattcctaaaaactaattgttgtcgcttccaagaaaaggacgaagatgacaatttaattgattcttactttgtagttaagagacacactttctctaactaccaacatgaagaaacaatttataatttacttaaggattgtccagctgttgctaaacatgacttctttaagtttagaatagacggtgacatggtaccacatatatcacgtcaacgtcttactaaatacacaatggcagacctcgtctatgctttaaggcattttgatgaaggtaattgtgacacattaaaagaaatacttgtcacatacaattgttgtgatgatgattatttcaataaaaaggactggtatgattttgtagaaaacccagatatattacgcgtatacgccaacttaggtgaacgtgtacgccaagctttgttaaaaacagtacaattctgtgatgccatgcgaaatgctggtattgttggtgtactgacattagataatcaagatctcaatggtaactggtatgatttcggtgatttcatacaaaccacgccaggtagtggagttcctgttgtagattcttattattcattgttaatgcctatattaaccttgaccagggctttaactgcagagtcacatgttgacactgacttaacaaagccttacattaagtgggatttgttaaaatatgacttcacggaagagaggttaaaactctttgaccgttattttaaatattgggatcagacataccacccaaattgtgttaactgtttggatgacagatgcattctgcattgtgcaaactttaatgttttattctctacagtgttcccacctacaagttttggaccactagtgagaaaaatatttgttgatggtgttccatttgtagtttcaactggataccacttcagagagctaggtgttgtacataatcaggatgtaaacttacatagctctagacttagttttaaggaattacttgtgtatgctgctgaccctgctatgcacgctgcttctggtaatctattactagataaacgcactacgtgcttttcagtagctgcacttactaacaatgttgcttttcaaactgtcaaacccggtaattttaacaaagacttctatgactttgctgtgtctaagggtttctttaaggaaggaagttctgttgaattaaaacacttcttctttgctcaggatggtaatgctgctatcagcgattatgactactatcgttataatctaccaacaatgtgtgatatcagacaactactatttgtagttgaagttgttgataagtactttgattgttacgatggtggctgtattaatgctaaccaagtcatcgtcaacaacctagacaaatcagctggttttccatttaataaatggggtaaggctagactttattatgattcaatgagttatgaggatcaagatgcacttttcgcatatacaaaacgtaatgtcatccctactataactcaaatgaatcttaagtatgccattagtgcaaagaatagagctcgcaccgtagctggtgtctctatctgtagtactatgaccaatagacagtttcatcaaaaattattgaaatcaatagccgccactagaggagctactgtagtaattggaacaagcaaattctatggtggttggcacaacatgttaaaaactgtttatagtgatgtagaaaaccctcaccttatgggttgggattatcctaaatgtgatagagccatgcctaacatgcttagaattatggcctcacttgttcttgctcgcaaacatacaacgtgttgtagcttgtcacaccgtttctatagattagctaatgagtgtgctcaagtattgagtgaaatggtcatgtgtggcggttcactatatgttaaaccaggtggaacctcatcaggagatgccacaactgcttatgctaatagtgtttttaacatttgtcaagctgtcacggccaatgttaatgcacttttatctactgatggtaacaaaattgccgataagtatgtccgcaatttacaacacagactttatgagtgtctctatagaaatagagatgttgacacagactttgtgaatgagttttacgcatatttgcgtaaacatttctcaatgatgatactctctgacgatgctgttgtgtgtttcaatagcacttatgcatctcaaggtctagtggctagcataaagaactttaagtcagttctttattatcaaaacaatgtttttatgtctgaagcaaaatgttggactgagactgaccttactaaaggacctcatgaattttgctctcaacatacaatgctagttaaacagggtgatgattatgtgtaccttccttacccagatccatcaagaatcctaggggccggctgttttgtagatgatatcgtaaaaacagatggtacacttatgattgaacggttcgtgtctttagctatagatgcttacccacttactaaacatcctaatcaggagtatgctgatgtctttcatttgtacttacaatacataagaaagctacatgatgagttaacaggacacatgttagacatgtattctgttatgcttactaatgataacacttcaaggtattgggaacctgagttttatgaggctatgtacacaccgcatacagtcttacaggctgttggggcttgtgttctttgcaattcacagacttcattaagatgtggtgcttgcatacgtagaccattcttatgttgtaaatgctgttacgaccatgtcatatcaacatcacataaattagtcttgtctgttaatccgtatgtttgcaatgctccaggttgtgatgtcacagatgtgactcaactttacttaggaggtatgagctattattgtaaatcacataaaccacccattagttttccattgtgtgctaatggacaagtttttggtttatataaaaatacatgtgttggtagcgataatgttactgactttaatgcaattgcaacatgtgactggacaaatgctggtgattacattttagctaacacctgtactgaaagactcaagctttttgcagcagaaacgctcaaagctactgaggagacatttaaactgtcttatggtattgctactgtacgtgaagtgctgtctgacagagaattacatctttcatgggaagttggtaaacctagaccaccacttaaccgaaattatgtctttactggttatcgtgtaactaaaaacagtaaagtacaaataggagagtacacctttgaaaaaggtgactatggtgatgctgttgtttaccgaggtacaacaacttacaaattaaatgttggtgattattttgtgctgacatcacatacagtaatgccattaagtgcacctacactagtgccacaagagcactatgttagaattactggcttatacccaacactcaatatctcagatgagttttctagcaatgttgcaaattatcaaaaggttggtatgcaaaagtattctacactccagggaccacctggtactggtaagagtcattttgctattggcctagctctctactacccttctgctcgcatagtgtatacagcttgctctcatgccgctgttgatgcactatgtgagaaggcattaaaatatttgcctatagataaatgtagtagaattatacctgcacgtgctcgtgtagagtgttttgataaattcaaagtgaattcaacattagaacagtatgtcttttgtactgtaaatgcattgcctgagacgacagcagatatagttgtctttgatgaaatttcaatggccacaaattatgatttgagtgttgtcaatgccagattacgtgctaagcactatgtgtacattggcgaccctgctcaattacctgcaccacgcacattgctaactaagggcacactagaaccagaatatttcaattcagtgtgtagacttatgaaaactataggtccagacatgttcctcggaacttgtcggcgttgtcctgctgaaattgttgacactgtgagtgctttggtttatgataataagcttaaagcacataaagacaaatcagctcaatgctttaaaatgttttataagggtgttatcacgcatgatgtttcatctgcaattaacaggccacaaataggcgtggtaagagaattccttacacgtaaccctgcttggagaaaagctgtctttatttcaccttataattcacagaatgctgtagcctcaaagattttgggactaccaactcaaactgttgattcatcacagggctcagaatatgactatgtcatattcactcaaaccactgaaacagctcactcttgtaatgtaaacagatttaatgttgctattaccagagcaaaagtaggcatactttgcataatgtctgatagagacctttatgacaagttgcaatttacaagtcttgaaattccacgtaggaatgtggcaactttacaagctgaaaatgtaacaggactctttaaagattgtagtaaggtaatcactgggttacatcctacacaggcacctacacacctcagtgttgacactaaattcaaaactgaaggtttatgtgttgacatacctggcatacctaaggacatgacctatagaagactcatctctatgatgggttttaaaatgaattatcaagttaatggttaccctaacatgtttatcacccgcgaagaagctataagacatgtacgtgcatggattggcttcgatgtcgaggggtgtcatgctactagagaagctgttggtaccaatttacctttacagctaggtttttctacaggtgttaacctagttgctgtacctacaggttatgttgatacacctaataatacagatttttccagagttagtgctaaaccaccgcctggagatcaatttaaacacctcataccacttatgtacaaaggacttccttggaatgtagtgcgtataaagattgtacaaatgttaagtgacacacttaaaaatctctctgacagagtcgtatttgtcttatgggcacatggctttgagttgacatctatgaagtattttgtgaaaataggacctgagcgcacctgttgtctatgtgatagacgtgccacatgcttttccactgcttcagacacttatgcctgttggcatcattctattggatttgattacgtctataatccgtttatgattgatgttcaacaatggggttttacaggtaacctacaaagcaaccatgatctgtattgtcaagtccatggtaatgcacatgtagctagttgtgatgcaatcatgactaggtgtctagctgtccacgagtgctttgttaagcgtgttgactggactattgaatatcctataattggtgatgaactgaagattaatgcggcttgtagaaaggttcaacacatggttgttaaagctgcattattagcagacaaattcccagttcttcacgacattggtaaccctaaagctattaagtgtgtacctcaagctgatgtagaatggaagttctatgatgcacagccttgtagtgacaaagcttataaaatagaagaattattctattcttatgccacacattctgacaaattcacagatggtgtatgcctattttggaattgcaatgtcgatagatatcctgctaattccattgtttgtagatttgacactagagtgctatctaaccttaacttgcctggttgtgatggtggcagtttgtatgtaaataaacatgcattccacacaccagcttttgataaaagtgcttttgttaatttaaaacaattaccatttttctattactctgacagtccatgtgagtctcatggaaaacaagtagtgtcagatatagattatgtaccactaaagtctgctacgtgtataacacgttgcaatttaggtggtgctgtctgtagacatcatgctaatgagtacagattgtatctcgatgcttataacatgatgatctcagctggctttagcttgtgggtttacaaacaatttgatacttataacctctggaacacttttacaagacttcagagtttagaaaatgtggcttttaatgttgtaaataagggacactttgatggacaacagggtgaagtaccagtttctatcattaataacactgtttacacaaaagttgatggtgttgatgtagaattgtttgaaaataaaacaacattacctgttaatgtagcatttgagctttgggctaagcgcaacattaaaccagtaccagaggtgaaaatactcaataatttgggtgtggacattgctgctaatactgtgatctgggactacaaaagagatgctccagcacatatatctactattggtgtttgttctatgactgacatagccaagaaaccaactgaaacgatttgtgcaccactcactgtcttttttgatggtagagttgatggtcaagtagacttatttagaaatgcccgtaatggtgttcttattacagaaggtagtgttaaaggtttacaaccatctgtaggtcccaaacaagctagtcttaatggagtcacattaattggagaagccgtaaaaacacagttcaattattataagaaagttgatggtgttgtccaacaattacctgaaacttactttactcagagtagaaatttacaagaatttaaacccaggagtcaaatggaaattgatttcttagaattagctatggatgaattcattgaacggtataaattagaaggctatgccttcgaacatatcgtttatggagattttagtcatagtcagttaggtggtttacatctactgattggactagctaaacgttttaaggaatcaccttttgaattagaagattttattcctatggacagtacagttaaaaactatttcataacagatgcgcaaacaggttcatctaagtgtgtgtgttctgttattgatttattacttgatgattttgttgaaataataaaatcccaagatttatctgtagtttctaaggttgtcaaagtgactattgactatacagaaatttcatttatgctttggtgtaaagatggccatgtagaaacattttacccaaaattacaatctagtcaagcgtggcaaccgggtgttgctatgcctaatctttacaaaatgcaaagaatgctattagaaaagtgtgaccttcaaaattatggtgatagtgcaacattacctaaaggcataatgatgaatgtcgcaaaatatactcaactgtgtcaatatttaaacacattaacattagctgtaccctataatatgagagttatacattttggtgctggttctgataaaggagttgcaccaggtacagctgttttaagacagtggttgcctacgggtacgctgcttgtcgattcagatcttaatgactttgtctctgatgcagattcaactttgattggtgattgtgcaactgtacatacagctaataaatgggatctcattattagtgatatgtacgaccctaagactaaaaatgttacaaaagaaaatgactctaaagagggttttttcacttacatttgtgggtttatacaacaaaagctagctcttggaggttccgtggctataaagataacagaacattcttggaatgctgatctttataagctcatgggacacttcgcatggtggacagcctttgttactaatgtgaatgcgtcatcatctgaagcatttttaattggatgtaattatcttggcaaaccacgcgaacaaatagatggttatgtcatgcatgcaaattacatattttggaggaatacaaatccaattcagttgtcttcctattctttatttgacatgagtaaatttccccttaaattaaggggtactgctgttatgtctttaaaagaaggtcaaatcaatgatatgattttatctcttcttagtaaaggtagacttataattagagaaaacaacagagttgttatttctagtgatgttcttgttaacaactaaacgaacaatgtttgtttttcttgttttattgccactagtctctagtcagtgtgttaatcttacaaccagaactcaattaccccctgcatacactaattctttcacacgtggtgtttattaccctgacaaagttttcagatcctcagttttacattcaactcaggacttgttcttacctttcttttccaatgttacttggttccatgctatacatgtctctgggaccaatggtactaagaggtttgataaccctgtcctaccatttaatgatggtgtttattttgcttccactgagaagtctaacataataagaggctggatttttggtactactttagattcgaagacccagtccctacttattgttaataacgctactaatgttgttattaaagtctgtgaatttcaattttgtaatgatccatttttgggtgtttattaccacaaaaacaacaaaagttggatggaaagtgagttcagagtttattctagtgcgaataattgcacttttgaatatgtctctcagccttttcttatggaccttgaaggaaaacagggtaatttcaaaaatcttagggaatttgtgtttaagaatattgatggttattttaaaatatattctaagcacacgcctattaatttagtgcgtgatctcccccagggtttttcggctttagaaccattggtagatttgccaataggtattaacatcactaggtttcaaactttacttgctttacatagaagttatttgactcctggtgattcttcttcaggttggacagctggtgctgcagcttattatgtgggttatcttcaacctaggacttttctattaaaatataatgaaaatggaaccattacagatgctgtagactgtgcacttgaccctctctcagaaacaaagtgtacgttgaaatccttcactgtagaaaaaggaatctatcaaacttctaactttagagtccaaccaacagaatctattgttagatttcctaatattacaaacttgtgcccttttggtgaagtttttaacgccaccagatttgcatctgtttatgcttggaacaggaagagaatcagcaactgtgttgctgattattctgtcctatataattccgcatcattttccacttttaagtgttatggagtgtctcctactaaattaaatgatctctgctttactaatgtctatgcagattcatttgtaattagaggtgatgaagtcagacaaatcgctccagggcaaactggaaagattgctgattataattataaattaccagatgattttacaggctgcgttatagcttggaattctaacaatcttgattctaaggttggtggtaattataattacctgtatagattgtttaggaagtctaatctcaaaccttttgagagagatatttcaactgaaatctatcaggccggtagcacaccttgtaatggtgttgaaggttttaattgttactttcctttacaatcatatggtttccaacccactaatggtgttggttaccaaccatacagagtagtagtactttcttttgaacttctacatgcaccagcaactgtttgtggacctaaaaagtctactaatttggttaaaaacaaatgtgtcaatttcaacttcaatggtttaacaggcacaggtgttcttactgagtctaacaaaaagtttctgcctttccaacaatttggcagagacattgctgacactactgatgctgtccgtgatccacagacacttgagattcttgacattacaccatgttcttttggtggtgtcagtgttataacaccaggaacaaatacttctaaccaggttgctgttctttatcaggatgttaactgcacagaagtccctgttgctattcatgcagatcaacttactcctacttggcgtgtttattctacaggttctaatgtttttcaaacacgtgcaggctgtttaataggggctgaacatgtcaacaactcatatgagtgtgacatacccattggtgcaggtatatgcgctagttatcagactcagactaattctcctcggcgggcacgtagtgtagctagtcaatccatcattgcctacactatgtcacttggtgcagaaaattcagttgcttactctaataactctattgccatacccacaaattttactattagtgttaccacagaaattctaccagtgtctatgaccaagacatcagtagattgtacaatgtacatttgtggtgattcaactgaatgcagcaatcttttgttgcaatatggcagtttttgtacacaattaaaccgtgctttaactggaatagctgttgaacaagacaaaaacacccaagaagtttttgcacaagtcaaacaaatttacaaaacaccaccaattaaagattttggtggttttaatttttcacaaatattaccagatccatcaaaaccaagcaagaggtcatttattgaagatctacttttcaacaaagtgacacttgcagatgctggcttcatcaaacaatatggtgattgccttggtgatattgctgctagagacctcatttgtgcacaaaagtttaacggccttactgttttgccacctttgctcacagatgaaatgattgctcaatacacttctgcactgttagcgggtacaatcacttctggttggacctttggtgcaggtgctgcattacaaataccatttgctatgcaaatggcttataggtttaatggtattggagttacacagaatgttctctatgagaaccaaaaattgattgccaaccaatttaatagtgctattggcaaaattcaagactcactttcttccacagcaagtgcacttggaaaacttcaagatgtggtcaaccaaaatgcacaagctttaaacacgcttgttaaacaacttagctccaattttggtgcaatttcaagtgttttaaatgatatcctttcacgtcttgacaaagttgaggctgaagtgcaaattgataggttgatcacaggcagacttcaaagtttgcagacatatgtgactcaacaattaattagagctgcagaaatcagagcttctgctaatcttgctgctactaaaatgtcagagtgtgtacttggacaatcaaaaagagttgatttttgtggaaagggctatcatcttatgtccttccctcagtcagcacctcatggtgtagtcttcttgcatgtgacttatgtccctgcacaagaaaagaacttcacaactgctcctgccatttgtcatgatggaaaagcacactttcctcgtgaaggtgtctttgtttcaaatggcacacactggtttgtaacacaaaggaatttttatgaaccacaaatcattactacagacaacacatttgtgtctggtaactgtgatgttgtaataggaattgtcaacaacacagtttatgatcctttgcaacctgaattagactcattcaaggaggagttagataaatattttaagaatcatacatcaccagatgttgatttaggtgacatctctggcattaatgcttcagttgtaaacattcaaaaagaaattgaccgcctcaatgaggttgccaagaatttaaatgaatctctcatcgatctccaagaacttggaaagtatgagcagtatataaaatggccatggtacatttggctaggttttatagctggcttgattgccatagtaatggtgacaattatgctttgctgtatgaccagttgctgtagttgtctcaagggctgttgttcttgtggatcctgctgcaaatttgatgaagacgactctgagccagtgctcaaaggagtcaaattacattacacataaacgaacttatggatttgtttatgagaatcttcacaattggaactgtaactttgaagcaaggtgaaatcaaggatgctactccttcagattttgttcgcgctactgcaacgataccgatacaagcctcactccctttcggatggcttattgttggcgttgcacttcttgctgtttttcagagcgcttccaaaatcataaccctcaaaaagagatggcaactagcactctccaagggtgttcactttgtttgcaacttgctgttgttgtttgtaacagtttactcacaccttttgctcgttgctgctggccttgaagccccttttctctatctttatgctttagtctacttcttgcagagtataaactttgtaagaataataatgaggctttggctttgctggaaatgccgttccaaaaacccattactttatgatgccaactattttctttgctggcatactaattgttacgactattgtataccttacaatagtgtaacttcttcaattgtcattacttcaggtgatggcacaacaagtcctatttctgaacatgactaccagattggtggttatactgaaaaatgggaatctggagtaaaagactgtgttgtattacacagttacttcacttcagactattaccagctgtactcaactcaattgagtacagacactggtgttgaacatgttaccttcttcatctacaataaaattgttgatgagcctgaagaacatgtccaaattcacacaatcgacggttcatccggagttgttaatccagtaatggaaccaatttatgatgaaccgacgacgactactagcgtgcctttgtaagcacaagctgatgagtacgaacttatgtactcattcgtttcggaagagacaggtacgttaatagttaatagcgtacttctttttcttgctttcgtggtattcttgctagttacactagccatccttactgcgcttcgattgtgtgcgtactgctgcaatattgttaacgtgagtcttgtaaaaccttctttttacgtttactctcgtgttaaaaatctgaattcttctagagttcctgatcttctggtctaaacgaactaaatattatattagtttttctgtttggaactttaattttagccatggcagattccaacggtactattaccgttgaagagcttaaaaagctccttgaacaatggaacctagtaataggtttcctattccttacatggatttgtcttctacaatttgcctatgccaacaggaataggtttttgtatataattaagttaattttcctctggctgttatggccagtaactttagcttgttttgtgcttgctgctgtttacagaataaattggatcaccggtggaattgctatcgcaatggcttgtcttgtaggcttgatgtggctcagctacttcattgcttctttcagactgtttgcgcgtacgcgatccatgtggtcattcaatccagaaactaacattcttctcaacgtgccactccatggcactattctgaccagaccgcttctagaaagtgaactcgtaatcggagctgtgatccttcgtggacatcttcgtattgctggacaccatctaggacgctgtgacatcaaggacctgcctaaagaaatcactgttgctacatcacgaacgctttcttattacaaattgggagcttcgcagcgtgtagcaggtgactcaggttttgctgcatacagtcgctacaggattggcaactataaattaaacacagaccattccagtagcagtgacaatattgctttgcttgtacagtaagtgacaacagatgtttcatctcgttgactttcaggttactatagcagagatattactaattattatgaggacttttaaagtttccatttggaatcttgattacatcataaacctcataattaaaaatttatctaagtcactaactgagaataaatattctcaattagatgaagagcaaccaatggagattgattaaacgaacatgaaaattattcttttcttggcactgataacactcgctacttgtgagctttatcactaccaagagtgtgttagaggtacaacagtacttttaaaagaaccttgctcttctggaacatacgagggcaattcaccatttcatcctctagctgataacaaatttgcactgacttgctttagcactcaatttgcttttgcttgtcctgacggcgtaaaacacgtctatcagttacgtgccagatcagtttcacctaaactgttcatcagacaagaggaagttcaagaactttactctccaatttttcttattgttgcggcaatagtgtttataacactttgcttcacactcaaaagaaagacagaatgattgaactttcattaattgacttctatttgtgctttttagcctttctgctattccttgttttaattatgcttattatcttttggttctcacttgaactgcaagatcataatgaaacttgtcacgcctaaacgaacatgaaatttcttgttttcttaggaatcatcacaactgtagctgcatttcaccaagaatgtagtttacagtcatgtactcaacatcaaccatatgtagttgatgacccgtgtcctattcacttctattctaaatggtatattagagtaggagctagaaaatcagcacctttaattgaattgtgcgtggatgaggctggttctaaatcacccattcagtacatcgatatcggtaattatacagtttcctgtttaccttttacaattaattgccaggaacctaaattgggtagtcttgtagtgcgttgttcgttctatgaagactttttagagtatcatgacgttcgtgttgttttagatttcatctaaacgaacaaactaaaatgtctgataatggaccccaaaatcagcgaaatgcaccccgcattacgtttggtggaccctcagattcaactggcagtaaccagaatggagaacgcagtggggcgcgatcaaaacaacgtcggccccaaggtttacccaataatactgcgtcttggttcaccgctctcactcaacatggcaaggaagaccttaaattccctcgaggacaaggcgttccaattaacaccaatagcagtccagatgaccaaattggctactaccgaagagctaccagacgaattcgtggtggtgacggtaaaatgaaagatctcagtccaagatggtatttctactacctaggaactgggccagaagctggacttccctatggtgctaacaaagacggcatcatatgggttgcaactgagggagccttgaatacaccaaaagatcacattggcacccgcaatcctgctaacaatgctgcaatcgtgctacaacttcctcaaggaacaacattgccaaaaggcttctacgcagaagggagcagaggcggcagtcaagcctcttctcgttcctcatcacgtagtcgcaacagttcaagaaattcaactccaggcagcagtaggggaacttctcctgctagaatggctggcaatggcggtgatgctgctcttgctttgctgctgcttgacagattgaaccagcttgagagcaaaatgtctggtaaaggccaacaacaacaaggccaaactgtcactaagaaatctgctgctgaggcttctaagaagcctcggcaaaaacgtactgccactaaagcatacaatgtaacacaagctttcggcagacgtggtccagaacaaacccaaggaaattttggggaccaggaactaatcagacaaggaactgattacaaacattggccgcaaattgcacaatttgcccccagcgcttcagcgttcttcggaatgtcgcgcattggcatggaagtcacaccttcgggaacgtggttgacctacacaggtgccatcaaattggatgacaaagatccaaatttcaaagatcaagtcattttgctgaataagcatattgacgcatacaaaacattcccaccaacagagcctaaaaaggacaaaaagaagaaggctgatgaaactcaagccttaccgcagagacagaagaaacagcaaactgtgactcttcttcctgctgcagatttggatgatttctccaaacaattgcaacaatccatgagcagtgctgactcaactcaggcctaaactcatgcagaccacacaaggcagatgggctatataaacgttttcgcttttccgtttacgatatatagtctactcttgtgcagaatgaattctcgtaactacatagcacaagtagatgtagttaactttaatctcacatagcaatctttaatcagtgtgtaacattagggaggacttgaaagagccaccacattttcaccgaggccacgcggagtacgatcgagtgtacagtgaacaatgctagggagagctgcctatatggaagagccctaatgtgtaaaattaattttagtagtgctatccccatgtgattttaatagcttcttaggagaatgacaaaaaaaaaaaaaaaaaaaaaaaaaaaaaaaaaaaaaaaaaaaaaaaaaaaaaaaaaaagggtcggcatggcatctccacctcctcgcggtccgacctgggcatccgaaggaggacgcacgtccactcggatggctaagggagcagcacactggcggccgttactagggccgcgcccttcccaacagttgcgcagcctgaatggcgaatggagatccaatttttaagtgtataatgtgttaaactactgattctaattgtttgtgtattttagattcacagtcccaaggctcatttcaggcccctcagtcctcacagtctgttcatgatcataatcagccataccacatttgtagaggttttacttgctttaaaaaacctcccacacctccccctgaacctgaaacataaaatgaatgcaattgttgttgttaacttgtttattgcagcttataatggttacaaataaagcaatagcatcacaaatttcacaaataaagcatttttttcactgcattctagttgtggtttgtccaaactcatcaatgtatcttaaagcttgagtattctatagtctcacctaaatagcttggcgtaatcatggtcatagctgtttcctgtgtgaaattgttatccgctcacaattccacacaacatacgagccggaagcataaagtgtaaagcctggggtgcctaatgagtgagctaactcacattaattgcgttgcgctcactgcccgctttccagtcgggaaacctgtcgtgccagctgcattaatgaatcggccaacgcgaaccccttgcggccgcccgggccgtcgaccaattctcatgtttgacagcttatcatcgaatttctgccattcatccgcttattatcacttattcaggcgtagcaaccaggcgtttaagggcaccaataactgccttaaaaaaattacgccccgccctgccactcatcgcagtactgttgtaattcattaagcattctgccgacatggaagccatcacaaacggcatgatgaacctgaatcgccagcggcatcagcaccttgtcgccttgcgtataatatttgcccatggtgaaaacgggggcgaagaagttgtccatattggccacgtttaaatcaaaactggtgaaactcacccagggattggctgagacgaaaaacatattctcaataaaccctttagggaaataggccaggttttcaccgtaacacgccacatcttgcgaatatatgtgtagaaactgccggaaatcgtcgtggtattcactccagagcgatgaaaacgtttcagtttgctcatggaaaacggtgtaacaagggtgaacactatcccatatcaccagctcaccgtctttcattgccatacgaaattccggatgagcattcatcaggcgggcaagaatgtgaataaaggccggataaaacttgtgcttatttttctttacggtctttaaaaaggccgtaatatccagctgaacggtctggttataggtacattgagcaactgactgaaatgcctcaaaatgttctttacgatgccattgggatatatcaacggtggtatatccagtgatttttttctccattttagcttccttagctcctgaaaatctcgataactcaaaaaatacgcccggtagtgatcttatttcattatggtgaaagttggaacctcttacgtgccgatcaacgtctcattttcgccaaaagttggcccagggcttcccggtatcaacagggacaccaggatttatttattctgcgaagtgatcttccgtcacaggtatttattcgcgataagctcatggagcggcgtaaccgtcgcacaggaaggacagagaaagcgcggatctgggaagtgacggacagaacggtcaggacctggattggggaggcggttgccgccgctgctgctgacggtgtgacgttctctgttccggtcacaccacatacgttccgccattcctatgcgatgcacatgctgtatgccggtataccgctgaaagttctgcaaagcctgatgggacataagtccatcagttcaacggaagtctacacgaaggtttttgcgctggatgtggctgcccggcaccgggtgcagtttgcgatgccggagtctgatgcggttgcgatgctgaaacaattatcctgagaataaatgccttggcctttatatggaaatgtggaactgagtggatatgctgtttttgtctgttaaacagagaagctggctgttatccactgagaagcgaacgaaacagtcgggaaaatctcccattatcgtagagatccgcattattaatctcaggagcctgtgtagcgtttataggaagtagtgttctgtcatgatgcctgcaagcggtaacgaaaacgatttgaatatgccttcaggaacaatagaaatcttcgtgcggtgttacgttgaagtggagcggattatgtcagcaatggacagaacaacctaatgaacacagaaccatgatgtggtctgtccttttacagccagtagtgctcgccgcagtcgagcgacagggcgaagccctcggctggttgccctcgccgctgggctggcggccgtctatggccctgcaaacgcgccagaaacgccgtcgaagccgtgtgcgagacaccgcggccggccgccggcgttgtggatacctcgcggaaaacttggccctcactgacagatgaggggcggacgttgacacttgaggggccgactcacccggcgcggcgttgacagatgaggggcaggctcgatttcggccggcgacgtggagctggccagcctcgcaaatcggcgaaaacgcctgattttacgcgagtttcccacagatgatgtggacaagcctggggataagtgccctgcggtattgacacttgaggggcgcgactactgacagatgaggggcgcgatccttgacacttgaggggcagagtgctgacagatgaggggcgcacctattgacatttgaggggctgtccacaggcagaaaatccagcatttgcaagggtttccgcccgtttttcggccaccgctaacctgtcttttaacctgcttttaaaccaatatttataaaccttgtttttaaccagggctgcgccctgtgcgcgtgaccgcgcacgccgaaggggggtgcccccccttctcgaaccctcccggtcgagtgagcgaggaagcaccagggaacagcacttatatattctgcttacacacgatgcctgaaaaaacttcccttggggttatccacttatccacggggatatttttataattattttttttatagtttttagatcttcttttttagagcgccttgtaggcctttatccatgctggttctagagaaggtgttgtgacaaattgccctttcagtgtgacaaatcaccctcaaatgacagtcctgtctgtgacaaattgcccttaaccctgtgacaaattgccctcagaagaagctgttttttcacaaagttatccctgcttattgactcttttttatttagtgtgacaatctaaaaacttgtcacacttcacatggatctgtcatggcggaaacagcggttatcaatcacaagaaacgtaaaaatagcccgcgaatcgtccagtcaaacgacctcactgaggcggcatatagtctctcccgggatcaaaaacgtatgctgtatctgttcgttgaccagatcagaaaatctgatggcaccctacaggaacatgacggtatctgcgagatccatgttgctaaatatgctgaaatattcggattgacctctgcggaagccagtaaggatatacggcaggcattgaagagtttcgcggggaaggaagtggttttttatcgccctgaagaggatgccggcgatgaaaaaggctatgaatcttttccttggtttatcaaacgtgcgcacagtccatccagagggctttacagtgtacatatcaacccatatctcattcccttctttatcgggttacagaaccggtttacgcagtttcggcttagtgaaacaaaagaaatcaccaatccgtatgccatgcgtttatacgaatccctgtgtcagtatcgtaagccggatggctcaggcatcgtctctctgaaaatcgactggatcatagagcgttaccagctgcctcaaagttaccagcgtatgcctgacttccgccgccgcttcctgcaggtctgtgttaatgagatcaacagcagaactccaatgcgcctctcatacattgagaaaaagaaaggccgccagacgactcatatcgtattttccttccgcgatatcacttccatgacgacaggatagtctgagggttatctgtcacagatttgagggtggttcgtcacatttgttctgacctactgagggtaatttgtcacagttttgctgtttccttcagcctgcatggattttctcatactttttgaactgtaatttttaaggaagccaaatttgagggcagtttgtcacagttgatttccttctctttcccttcgtcatgtgacctgatatcgggggttagttcgtcatcattgatgagggttgattatcacagtttattactctgaattggctatccgcgtgtgtacctctacctggagtttttcccacggtggatatttcttcttgcgctgagcgtaagagctatctgacagaacagttcttctttgcttcctcgccagttcgctcgctatgctcggttacacggctgcggcg

SEQ ID NO: 11 - DNA, 35283 bp, Artificial Sequence
  Clone pCCI-4K-SARS-CoV-2-DWDWD. Based on SARS-CoV-2.
gatgtgctgcaaggcgattaagttgggtaacgccagggttttcccagtcacgacgttgtaaaacgacggccagtgaattgtaatacgactcactatagggcgaattctagttattaatagtaatcaattacggggtcattagttcatagcccatatatggagttccgcgttacataacttacggtaaatggcccgcctggctgaccgcccaacgacccccgcccattgacgtcaataatgacgtatgttcccatagtaacgccaatagggactttccattgacgtcaatgggtggagtatttacggtaaactgcccacttggcagtacatcaagtgtatcatatgccaagtacgccccctattgacgtcaatgacggtaaatggcccgcctggcattatgcccagtacatgaccttatgggactttcctacttggcagtacatctacgtattagtcatcgctattaccatggtgatgcggttttggcagtacatcaatgggcgtggatagcggtttgactcacggggatttccaagtctccaccccattgacgtcaatgggagtttgttttggcaccaaaatcaacgggactttccaaaatgtcgtaacaactccgccccattgacgcaaatgggcggtaggcgtgtacggtgggaggtctatataagcagagctggtttagtgaaccgtattaaaggtttataccttcccaggtaacaaaccaaccaactttcgatctcttgtagatctgttctctaaacgaactttaaaatctgtgtggctgtcactcggctgcatgcttagtgcactcacgcagtataattaataactaattactgtcgttgacaggacacgagtaactcgtctatcttctgcaggctgcttacggtttcgtccgtgttgcagccgatcatcagcacatctaggtttcgtccgggtgtgaccgaaaggtaagatggagagccttgtccctggtttcaacgagaaaacacacgtccaactcagtttgcctgttttacaggttcgcgacgtgctcgtacgtggctttggagactccgtggaggaggtcttatcagaggcacgtcaacatcttaaagatggcacttgtggcttagtagaagttgaaaaaggcgttttgcctcaacttgaacagccctatgtgttcatcaaacgttcggatgctcgaactgcacctcatggtcatgttatggttgagctggtagcagaactcgaaggcattcagtacggtcgtagtggtgagacacttggtgtccttgtccctcatgtgggcgaaataccagtggcttaccgcaaggttcttcttcgtaagaacggtaataaaggagctggtggccatagttacggcgccgatctaaagtcatttgacttaggcgacgagcttggcactgatccttatgaagattttcaagaaaactggaacactaaacatagcagtggtgttacccgtgaactcatgcgtgagcttaacggaggggcatacactcgctatgtcgataacaacttctgtggccctgatggctaccctcttgagtgcattaaagaccttctagcacgtgctggtaaagcttcatgcactttgtccgaacaactggactttattgacactaagaggggtgtatactgctgccgtgaacatgagcatgaaattgcttggtacacggaacgttctgaaaagagctatgaattgcagacaccttttgaaattaaattggcaaagaaatttgacaccttcaatggggaatgtccaaattttgtatttcccttaaattccataatcaagactattcaaccaagggttgaaaagaaaaagcttgatggctttatgggtagaattcgatctgtctatccagttgcgtcaccaaatgaatgcaaccaaatgtgcctttcaactctcatgaagtgtgatcattgtggtgaaacttcatggcagacgggcgattttgttaaagccacttgcgaattttgtggcactgagaatttgactaaagaaggtgccactacttgtggttacttaccccaaaatgctgttgttaaaatttattgtccagcatgtcacaattcagaagtaggacctgagcatagtcttgccgaataccataatgaatctggcttgaaaaccattcttcgtaagggtggtcgcactattgcctttggaggctgtgtgttctcttatgttggttgccataacaagtgtgcctattgggtcccgcgtgcgagtgcgaacataggttgtaatcatacgggtgtagtaggtgaaggttcggaaggtctaaatgataatctactagaaatactacaaaaagaaaaagtaaatataaatatagtaggtgattttaaactaaatgaagaaatagcgataatattagcgtcgttttcggcgtcgacgagtgcgtttgtagaaacggtaaaaggtttagattataaagcgtttaaacaaatagtagaatcgtgtggtaattttaaagtgacgaaaggtaaagcgaaaaaaggtgcgtggaatataggtgaacaaaaatcgatactaagtccgctatatgcgtttgcgtcggaagcggcgcgtgtagtacgttcgatattttcgcgtacgctagaaacggcgcaaaattcggtacgtgtattacaaaaagcggcgataacgatactagatggtatatcgcaatattcgctacgtctaatagatgcgatgatgtttacgtcggatttagcgacgaataatctagtagtaatggcgtatataacgggtggtgtagtacaattaacgtcgcaatggctaacgaatatatttggtacggtatatgaaaaactaaaaccggtactagattggctagaagaaaaatttaaagaaggtgtagaatttctacgtgatggttgggaaatagtaaaatttatatcgacgtgtgcgtgtgaaatagtaggtggtcaaatagtaacgtgtgcgaaagaaataaaagaatcggtacaaacgttttttaaactagtaaataaatttctagcgctatgtgcggattcgataataataggtggtgcgaaactaaaagcgctaaatctaggtgaaacgtttgtgacgcattcgaaaggtttatatcgtaaatgtgtaaaatcgcgtgaagaaacgggtctactaatgccgctaaaagcgccgaaagaaataatatttttagaaggtgaaacgctaccgacggaagtattaacggaagaagtagtattaaaaacgggtgatttacaaccgttagaacaaccgacgtcggaagcggtagaagcgccgttagtaggtacgccggtatgtataaatggtctaatgttactagaaataaaagatacggaaaaatattgtgcgctagcgccgaatatgatggtaacgaataatacgtttacgctaaaaggtggtgcgccgacgaaagtaacgtttggtgatgatacggtaatagaagtacaaggttataaatcggtaaatataacgtttgaactagatgaacgtatagataaagtactaaatgaaaaatgttcggcgtatacggtagaactaggtacggaagtaaatgaatttgcgtgtgtagtagcggatgcggtaataaaaacgttacaaccggtatcggaattactaacgccgctaggtatagatttagatgaatggtcgatggcgacgtattatttatttgatgaatcgggtgaatttaaattagcgtcgcatatgtattgttcgttttatccgccggatgaagatgaagaagaaggtgattgtgaagaagaagaatttgaaccgtcgacgcaatatgaatatggtacggaagatgattatcaaggtaaaccgttagaatttggtgcgacgtcggcggcgctacaaccggaagaagaacaagaagaagattggttggatgatgattcgcaacaaacggtaggtcaacaagatggttcggaagataatcaaacgacgacgatacaaacgatagtagaagtacaaccgcaattagaaatggaactaacgccggtagtacaaacgatagaagtaaattcgttttcgggttatttaaaactaacggataatgtatatataaaaaatgcggatatagtagaagaagcgaaaaaagtaaaaccgacggtagtagtaaatgcggcgaatgtatatctaaaacatggtggtggtgtagcgggtgcgttaaataaagcgacgaataatgcgatgcaagtagaatcggatgattatatagcgacgaatggtccgctaaaagtaggtggttcgtgtgtattatcgggtcataatctagcgaaacattgtctacatgtagtaggtccgaatgtaaataaaggtgaagatatacaactactaaaatcggcgtatgaaaattttaatcaacatgaagtactactagcgccgttattatcggcgggtatatttggtgcggacccgatacattcgttacgtgtgtgtgtagatacggtacgcacgaatgtatatttagcggtatttgataaaaatctatatgataaactagtatcgtcgtttttagaaatgaaatcggaaaaacaagtagaacaaaaaatagcggaaataccgaaagaagaagtaaaaccgtttataacggaatcgaaaccgtcggtagaacaacgtaaacaagatgataaaaaaataaaagcgtgtgtagaagaagtaacgacgacgctagaagaaacgaaatttctaacagaaaatttattactatatatagatataaatggtaatctacatccggattcggcgacgctagtatcggatatagatataacgtttttaaaaaaagatgcgccgtatatagtaggtgatgtagtacaagaaggtgtattaacggcggtagtaataccgacgaaaaaagcgggtggtacgacggaaatgctggcgaaagcgttacgtaaagtaccgacggataattatataacgacgtacccgggtcagggtttaaatggttacactgtagaggaggcaaagacagtgcttaaaaagtgtaaaagtgccttttacattctaccatctattatctctaatgagaagcaagaaattcttggaactgtttcttggaatttgcgagaaatgcttgcacatgcagaagaaacacgcaaattaatgcctgtctgtgtggaaactaaagccatagtttcaactatacagcgtaaatataagggtattaaaatacaagagggtgtggttgattatggtgctagattttacttttacaccagtaaaacaactgtagcgtcacttatcaacacacttaacgatctaaatgaaactcttgttacaatgccacttggctatgtaacacatggcttaaatttggaagaagctgctcggtatatgagatctctcaaagtgccagctacagtttctgtttcttcacctgatgctgttacagcgtataatggttatcttacttcttcttctaaaacacctgaagaacattttattgaaaccatctcacttgctggttcctataaagattggtcctattctggacaatctacacaactaggtatagaatttcttaagagaggtgataaaagtgtatattacactagtaatcctaccacattccacctagatggtgaagttatcacctttgacaatcttaagacacttctttctttgagagaagtgaggactattaaggtgtttacaacagtagacaacattaacctccacacgcaagttgtggacatgtcaatgacatatggacaacagtttggtccaacttatttggatggagctgatgttactaaaataaaacctcataattcacatgaaggtaaaacattttatgttttacctaatgatgacactctacgtgttgaggcttttgagtactaccacacaactgatcctagttttctgggtaggtacatgtcagcattaaatcacactaaaaagtggaaatacccacaagttaatggtttaacttctattaaatgggcagataacaactgttatcttgccactgcattgttaacactccaacaaatagagttgaagtttaatccacctgctctacaagatgcttattacagagcaagggctggtgaagctgctaacttttgtgcacttatcttagcctactgtaataagacagtaggtgagttaggtgatgttagagaaacaatgagttacttgtttcaacatgccaatttagattcttgcaaaagagtcttgaacgtggtgtgtaaaacttgtggacaacagcagacaacccttaagggtgtagaagctgttatgtacatgggcacactttcttatgaacaatttaagaaaggtgttcagataccttgtacgtgtggtaaacaagctacaaaatatctagtacaacaggagtcaccttttgttatgatgtcagcaccacctgctcagtatgaacttaagcatggtacatttacttgtgctagtgagtacactggtaattaccagtgtggtcactataaacatataacttctaaagaaactttgtattgcatagacggtgctttacttacaaagtcctcagaatacaaaggtcctattacggatgttttctacaaagaaaacagttacacaacaaccataaaaccagttacttataaattggatggtgttgtttgtacagaaattgaccctaagttggacaattattataagaaagacaattcttatttcacagagcaaccaattgatcttgtaccaaaccaaccatatccaaacgcaagcttcgataattttaagtttgtatgtgataatatcaaatttgctgatgatttaaaccagttaactggttataagaaacctgcttcaagagagcttaaagttacatttttccctgacttaaatggtgatgtggtggctattgattataaacactacacaccctcttttaagaaaggagctaaattgttacataaacctattgtttggcatgttaacaatgcaactaataaagccacgtataaaccaaatacctggtgtatacgttgtctttggagcacaaaaccagttgaaacatcaaattcgtttgatgtactgaagtcagaggacgcgcagggaatggataatcttgcctgcgaagatctaaaaccagtctctgaagaagtagtggaaaatcctaccatacagaaagacgttcttgagtgtaatgtgaaaactaccgaagttgtaggagacattatacttaaaccagcaaataatagtttaaaaattacagaagaggttggccacacagatctaatggctgcttatgtagacaattctagtcttactattaagaaacctaatgaattatctagagtattaggtttgaaaacccttgctactcatggtttagctgctgttaatagtgtcccttgggatactatagctaattatgctaagccttttcttaacaaagttgttagtacaactactaacatagttacacggtgtttaaaccgtgtttgtactaattatatgccttatttctttactttattgctacaattgtgtacttttactagaagtacaaattctagaattaaagcatctatgccgactactatagcaaagaatactgttaagagtgtcggtaaattttgtctagaggcttcatttaattatttgaagtcacctaatttttctaaactgataaatattataatttggtttttactattaagtgtttgcctaggttcgttaatatattcgacggcggcgttaggtgtattaatgtcgaatttaggtatgccgtcgtattgtacgggttatcgtgaaggttatttaaattcgacgaatgtaacgatagcgacgtattgtacgggttcgataccgtgttcggtatgtctatcgggtttagattcgttagatacgtatccgtcgttagaaacgatacaaataacgatatcgtcgtttaaatgggatttaacggcgtttggtttagtagcggaatggtttttagcgtatatactatttacgcgatttttttatgtactaggtttagcggcgataatgcaattatttttttcgtattttgcggtacattttatttcgaattcgtggctaatgtggttaataataaatctagtacaaatggcgccgatatcggcgatggtacgtatgtatatattttttgcgtcgttttattatgtatggaaatcgtatgtacatgtagtagatggttgtaattcgtcgacgtgtatgatgtgttataaacgtaatcgtgcgacgcgagtagaatgtacgacgatagtaaatggtgtacgtcgttcgttttatgtatatgcgaatggtggtaaaggtttttgtaaactacataattggaattgtgtaaattgtgatacgttttgtgcgggttcgacgtttatatcggatgaagtagcgcgtgatttatcgctacaatttaaacgtccgataaatccgacggatcaatcgtcgtatatagtagattcggtaacggtaaaaaatggttcgatacatctatattttgataaagcgggtcaaaaaacgtatgaacgtcattcgctatcgcattttgtaaatttagataatctacgtgcgaataatacgaaaggttcgttaccgataaatgtaatagtatttgatggtaaatcgaaatgtgaagaatcgtcggcgaaatcggcgtcggtatattattcgcaactaatgtgtcaaccgatactattactagatcaagcgttagtatcggatgtaggtgattcggcggaagtagcggtaaaaatgtttgatgcgtatgtaaatacgttttcgtcgacgtttaatgtaccgatggaaaaactaaaaacgctagtagcgacggcggaagcggaactagcgaaaaatgtatctttagataatgtattatcgacgtttatatcggcggcgcgtcaaggttttgtagattcggatgtagaaacgaaagatgtagtagaatgtctaaaattatcgcatcaatcggatatagaagtaacgggtgattcgtgtaataattatatgctaacgtataataaagtagaaaatatgacgccgcgtgatctaggtgcgtgtatagattgttcggcgcgtcatataaatgcgcaagtagcgaaatcgcataatatagcgttaatatggaatgtaaaagattttatgtcgttatcggaacaactacgtaaacaaatacgttcggcggcgaaaaaaaataatttaccgtttaaattaacgtgtgcgacgacgcgacaagtagtaaatgtagtaacgacgaaaatagcgctaaaaggtggtaaaatagtaaataattggttaaaacaattaattaaagttacacttgtgttcctttttgttgctgctattttctatttaataacacctgttcatgtcatgtctaaacatactgacttttcaagtgaaatcataggatacaaggctattgatggtggtgtcactcgtgacatagcatctacagatacttgttttgctaacaaacatgctgattttgacacatggtttagccagcgtggtggtagttatactaatgacaaagcttgcccattgattgctgcagtcataacaagagaagtgggttttgtcgtgcctggtttgcctggcacgatattacgcacaactaatggtgactttttgcatttcttacctagagtttttagtgcagttggtaacatctgttacacaccatcaaaacttatagagtacactgactttgcaacatcagcttgtgttttggctgctgaatgtacaatttttaaagatgcttctggtaagccagtaccatattgttatgataccaatgtactagaaggttctgttgcttatgaaagtttacgccctgacacacgttatgtgctcatggatggctctattattcaatttcctaacacctaccttgaaggttctgttagagtggtaacaacttttgattctgagtactgtaggcacggcacttgtgaaagatcagaagctggtgtttgtgtatctactagtggtagatgggtacttaacaatgattattacagatctttaccaggagttttctgtggtgtagatgctgtaaatttacttactaatatgtttacaccactaattcaacctattggtgctttggacatatcagcatctatagtagctggtggtattgtagctatcgtagtaacatgccttgcctactattttatgaggtttagaagagcttttggtgaatacagtcatgtagttgcctttaatactttactattccttatgtcattcactgtactctgtttaacaccagtttactcattcttacctggtgtttattctgttatttacttgtacttgacattttatcttactaatgatgtttcttttttagcacatattcagtggatggttatgttcacacctttagtacctttctggataacaattgcttatatcatttgtatttccacaaagcatttctattggttctttagtaattacctaaagagacgtgtagtctttaatggtgtttcctttagtacttttgaagaagctgcgctgtgcacctttttgttaaataaagaaatgtatctaaagttgcgtagtgatgtgctattacctcttacgcaatataatagatacttagctctttataataagtacaagtattttagtggagcaatggatacaactagctacagagaagctgcttgttgtcatctcgcaaaggctctcaatgacttcagtaactcaggttctgatgttctttaccaaccaccacaaacctctatcacctcagctgttttgcagagtggttttagaaaaatggcattcccatctggtaaagttgagggttgtatggtacaagtaacttgtggtacaactacacttaacggtctttggcttgatgacgtagtttactgtccaagacatgtgatctgcacctctgaagacatgcttaaccctaattatgaagatttactcattcgtaagtctaatcataatttcttggtacaggctggtaatgttcaactcagggttattggacattctatgcaaaattgtgtacttaagcttaaggttgatacagccaatcctaagacacctaagtataagtttgttcgcattcaaccaggacagactttttcagtgttagcttgttacaatggttcaccatctggtgtttaccaatgtgctatgaggcccaatttcactattaagggttcattccttaatggttcatgtggtagtgttggttttaacatagattatgactgtgtctctttttgttacatgcaccatatggaattaccaactggagttcatgctggcacagacttagaaggtaacttttatggaccttttgttgacaggcaaacagcacaagcagctggtacggacacaactattacagttaatgttttagcttggttgtacgctgctgttataaatggagacaggtggtttctcaatcgatttaccacaactcttaatgactttaaccttgtggctatgaagtacaattatgaacctctaacacaagaccatgttgacatactaggacctctttctgctcaaactggaattgccgttttagatatgtgtgcttcattaaaagaattactgcaaaatggtatgaatggacgtaccatattgggtagtgctttattagaagatgaatttacaccttttgatgttgttagacaatgctcaggtgttactttccaaagtgcagtgaaaagaacaatcaagggtacacaccactggttgttactcacaattttgacttcacttttagttttagtccagagtactcaatggtctttgttcttttttttgtatgaaaatgcctttttaccttttgctatgggtattattgctatgtctgcttttgcaatgatgtttgtcaaacataagcatgcgtttctatgtttatttttattaccgtcgctagcgacggtagcgtattttaatatggtatatatgccggcgtcgtgggtaatgcgtataatgacgtggttagatatggtagatacgtcgttatcgggttttaaactaaaagattgtgtaatgtatgcgtcggcggtagtattactaatactaatgacggcgcgtacggtatatgatgatggtgcgcgtcgtgtatggacgctaatgaatgtattaacgctagtatataaagtatattatgggaatgcgttagatcaagcgatatcgatgtgggcgctaataatatcggtaacgtcgaattattcgggtgtagtaacgacggtaatgtttttagcgcgtggtatagtatttatgtgtgtagaatattgtccgatattttttataacgggtaatacactacaatgtataatgctagtatattgttttttaggttatttttgtacgtgttattttggtctattttgtttactaaatcgttattttcgtctaacactaggtgtatatgattatttagtatcgacgcaagaatttcgttatatgaattcgcaaggtctactaccgccgaaaaattcgatagatgcgtttaaactaaatataaaattattaggtgtaggtggtaaaccgtgtataaaagtagcgacggtacaatcgaaaatgtcggatgtaaaatgtacatcggtagtattactatcggtattacaacaactacgtgtagaatcgtcgtcgaaattatgggcgcaatgtgtacaattacataatgatatactattagcgaaagatacgacggaagcgtttgaaaaaatggtatcgctactatcggtattactatcgatgcaaggtgcggtagatataaataaactatgtgaagaaatgctagataatcgtgcgacgttacaagcgatagcgtcggaattttcgtcgctaccgtcgtatgcggcgtttgcgacggcgcaagaagcgtatgaacaagcggtagcgaatggtgattcggaagtagtactaaaaaaattaaaaaaatcgttaaatgtagcgaaatcggaatttgatcgtgatgcggcgatgcaacgtaaattagaaaaaatggcggatcaagcgatgacgcaaatgtataaacaagcgcgttcggaagataaacgtgcgaaagtaacgtcggcgatgcaaacgatgctatttacgatgctacgtaaattagataatgatgcgctaaataatataataaataatgcgcgtgatggttgtgtaccgttaaatataataccgctaacgacggcggcgaaactaatggtagtaataccggattataatacatataaaaatacgtgtgatggtacgacgtttacgtatgcgtcggcgttatgggaaatacaacaagtagtagatgcggattcgaaaatagtacaactatcggaaatatcgatggataattcgccgaatttagcgtggccgctaatagtaacggcgttacgtgcgaattcggcggtaaaattacaaaataatgaactatcgccggtagcgctacgacagatgtcttgtgctgccggtactacacaaactgcttgcactgatgacaatgcgttagcttactacaacacaacaaagggaggtaggtttgtacttgcactgttatccgatttacaggatttgaaatgggctagattccctaagagtgatggaactggtactatctatacagaactggaaccaccttgtaggtttgttacagacacacctaaaggtcctaaagtgaagtatttatactttattaaaggattaaacaacctaaatagaggtatggtacttggtagtttagctgccacagtacgtctacaagctggtaatgcaacagaagtgcctgccaattcaactgtattatctttctgtgcttttgctgtagatgctgctaaagcttacaaagattatctagctagtgggggacaaccaatcactaattgtgttaagatgttgtgtacacacactggtactggtcaggcaataacagttacaccggaagccaatatggatcaagaatcctttggtggtgcatcgtgttgtctgtactgccgttgccacatagatcatccaaatcctaaaggattttgtgacttaaaaggtaagtatgtacaaatacctacaacttgtgctaatgaccctgtgggttttacacttaaaaacacagtctgtaccgtctgcggtatgtggaaaggttatggctgtagttgtgatcaactccgcgaacccatgcttcagtcagctgatgcacaatcgtttttaaacgggtttgcggtgtaagtgcagcccgtcttacaccgtgcggcacaggcactagtactgatgtcgtatacagggcttttgacatctacaatgataaagtagctggttttgctaaattcctaaaaactaattgttgtcgcttccaagaaaaggacgaagatgacaatttaattgattcttactttgtagttaagagacacactttctctaactaccaacatgaagaaacaatttataatttacttaaggattgtccagctgttgctaaacatgacttctttaagtttagaatagacggtgacatggtaccacatatatcacgtcaacgtcttactaaatacacaatggcagacctcgtctatgctttaaggcattttgatgaaggtaattgtgacacattaaaagaaatacttgtcacatacaattgttgtgatgatgattatttcaataaaaaggactggtatgattttgtagaaaacccagatatattacgcgtatacgccaacttaggtgaacgtgtacgccaagctttgttaaaaacagtacaattctgtgatgccatgcgaaatgctggtattgttggtgtactgacattagataatcaagatctcaatggtaactggtatgatttcggtgatttcatacaaaccacgccaggtagtggagttcctgttgtagattcttattattcattgttaatgcctatattaaccttgaccagggctttaactgcagagtcacatgttgacactgacttaacaaagccttacattaagtgggatttgttaaaatatgacttcacggaagagaggttaaaactctttgaccgttattttaaatattgggatcagacataccacccaaattgtgttaactgtttggatgacagatgcattctgcattgtgcaaactttaatgttttattctctacagtgttcccacctacaagttttggaccactagtgagaaaaatatttgttgatggtgttccatttgtagtttcaactggataccacttcagagagctaggtgttgtacataatcaggatgtaaacttacatagctctagacttagttttaaggaattacttgtgtatgctgctgaccctgctatgcacgctgcttctggtaatctattactagataaacgcactacgtgcttttcagtagctgcacttactaacaatgttgcttttcaaactgtcaaacccggtaattttaacaaagacttctatgactttgctgtgtctaagggtttctttaaggaaggaagttctgttgaattaaaacacttcttctttgctcaggatggtaatgctgctatcagcgattatgactactatcgttataatctaccaacaatgtgtgatatcagacaactactatttgtagttgaagttgttgataagtactttgattgttacgatggtggctgtattaatgctaaccaagtcatcgtcaacaacctagacaaatcagctggttttccatttaataaatggggtaaggctagactttattatgattcaatgagttatgaggatcaagatgcacttttcgcatatacaaaacgtaatgtcatccctactataactcaaatgaatcttaagtatgccattagtgcaaagaatagagctcgcaccgtagctggtgtctctatctgtagtactatgaccaatagacagtttcatcaaaaattattgaaatcaatagccgccactagaggagctactgtagtaattggaacaagcaaattctatggtggttggcacaacatgttaaaaactgtttatagtgatgtagaaaaccctcaccttatgggttgggattatcctaaatgtgatagagccatgcctaacatgcttagaattatggcctcacttgttcttgctcgcaaacatacaacgtgttgtagcttgtcacaccgtttctatagattagctaatgagtgtgctcaagtattgagtgaaatggtcatgtgtggcggttcactatatgttaaaccaggtggaacctcatcaggagatgccacaactgcttatgctaatagtgtttttaacatttgtcaagctgtcacggccaatgttaatgcacttttatctactgatggtaacaaaattgccgataagtatgtccgcaatttacaacacagactttatgagtgtctctatagaaatagagatgttgacacagactttgtgaatgagttttacgcatatttgcgtaaacatttctcaatgatgatactctctgacgatgctgttgtgtgtttcaatagcacttatgcatctcaaggtctagtggctagcataaagaactttaagtcagttctttattatcaaaacaatgtttttatgtctgaagcaaaatgttggactgagactgaccttactaaaggacctcatgaattttgctctcaacatacaatgctagttaaacagggtgatgattatgtgtaccttccttacccagatccatcaagaatcctaggggccggctgttttgtagatgatatcgtaaaaacagatggtacacttatgattgaacggttcgtgtctttagctatagatgcttacccacttactaaacatcctaatcaggagtatgctgatgtctttcatttgtacttacaatacataagaaagctacatgatgagttaacaggacacatgttagacatgtattctgttatgcttactaatgataacacttcaaggtattgggaacctgagttttatgaggctatgtacacaccgcatacagtcttacaggctgttggggcttgtgttctttgcaattcacagacttcattaagatgtggtgcttgcatacgtagaccattcttatgttgtaaatgctgttacgaccatgtcatatcaacatcacataaattagtcttgtctgttaatccgtatgtttgcaatgctccaggttgtgatgtcacagatgtgactcaactttacttaggaggtatgagctattattgtaaatcacataaaccacccattagttttccattgtgtgctaatggacaagtttttggtttatataaaaatacatgtgttggtagcgataatgttactgactttaatgcaattgcaacatgtgactggacaaatgctggtgattacattttagctaacacctgtactgaaagactcaagctttttgcagcagaaacgctcaaagctactgaggagacatttaaactgtcttatggtattgctactgtacgtgaagtgctgtctgacagagaattacatctttcatgggaagttggtaaacctagaccaccacttaaccgaaattatgtctttactggttatcgtgtaactaaaaacagtaaagtacaaataggagagtacacctttgaaaaaggtgactatggtgatgctgttgtttaccgaggtacaacaacttacaaattaaatgttggtgattattttgtgctgacatcacatacagtaatgccattaagtgcacctacactagtgccacaagagcactatgttagaattactggcttatacccaacactcaatatctcagatgagttttctagcaatgttgcaaattatcaaaaggttggtatgcaaaagtattctacactccagggaccacctggtactggtaagagtcattttgctattggcctagctctctactacccttctgctcgcatagtgtatacagcttgctctcatgccgctgttgatgcactatgtgagaaggcattaaaatatttgcctatagataaatgtagtagaattatacctgcacgtgctcgtgtagagtgttttgataaattcaaagtgaattcaacattagaacagtatgtcttttgtactgtaaatgcattgcctgagacgacagcagatatagttgtctttgatgaaatttcaatggccacaaattatgatttgagtgttgtcaatgccagattacgtgctaagcactatgtgtacattggcgaccctgctcaattacctgcaccacgcacattgctaactaagggcacactagaaccagaatatttcaattcagtgtgtagacttatgaaaactataggtccagacatgttcctcggaacttgtcggcgttgtcctgctgaaattgttgacactgtgagtgctttggtttatgataataagcttaaagcacataaagacaaatcagctcaatgctttaaaatgttttataagggtgttatcacgcatgatgtttcatctgcaattaacaggccacaaataggcgtggtaagagaattccttacacgtaaccctgcttggagaaaagctgtctttatttcaccttataattcacagaatgctgtagcctcaaagattttgggactaccaactcaaactgttgattcatcacagggctcagaatatgactatgtcatattcactcaaaccactgaaacagctcactcttgtaatgtaaacagatttaatgttgctattaccagagcaaaagtaggcatactttgcataatgtctgatagagacctttatgacaagttgcaatttacaagtcttgaaattccacgtaggaatgtggcaactttacaagctgaaaatgtaacaggactctttaaagattgtagtaaggtaatcactgggttacatcctacacaggcacctacacacctcagtgttgacactaaattcaaaactgaaggtttatgtgttgacatacctggcatacctaaggacatgacctatagaagactcatctctatgatgggttttaaaatgaattatcaagttaatggttaccctaacatgtttatcacccgcgaagaagctataagacatgtacgtgcatggattggcttcgatgtcgaggggtgtcatgctactagagaagctgttggtaccaatttacctttacagctaggtttttctacaggtgttaacctagttgctgtacctacaggttatgttgatacacctaataatacagatttttccagagttagtgctaaaccaccgcctggagatcaatttaaacacctcataccacttatgtacaaaggacttccttggaatgtagtgcgtataaagattgtacaaatgttaagtgacacacttaaaaatctctctgacagagtcgtatttgtcttatgggcacatggctttgagttgacatctatgaagtattttgtgaaaataggacctgagcgcacctgttgtctatgtgatagacgtgccacatgcttttccactgcttcagacacttatgcctgttggcatcattctattggatttgattacgtctataatccgtttatgattgatgttcaacaatggggttttacaggtaacctacaaagcaaccatgatctgtattgtcaagtccatggtaatgcacatgtagctagttgtgatgcaatcatgactaggtgtctagctgtccacgagtgctttgttaagcgtgttgactggactattgaatatcctataattggtgatgaactgaagattaatgcggcttgtagaaaggttcaacacatggttgttaaagctgcattattagcagacaaattcccagttcttcacgacattggtaaccctaaagctattaagtgtgtacctcaagctgatgtagaatggaagttctatgatgcacagccttgtagtgacaaagcttataaaatagaagaattattctattcttatgccacacattctgacaaattcacagatggtgtatgcctattttggaattgcaatgtcgatagatatcctgctaattccattgtttgtagatttgacactagagtgctatctaaccttaacttgcctggttgtgatggtggcagtttgtatgtaaataaacatgcattccacacaccagcttttgataaaagtgcttttgttaatttaaaacaattaccatttttctattactctgacagtccatgtgagtctcatggaaaacaagtagtgtcagatatagattatgtaccactaaagtctgctacgtgtataacacgttgcaatttaggtggtgctgtctgtagacatcatgctaatgagtacagattgtatctcgatgcttataacatgatgatctcagctggctttagcttgtgggtttacaaacaatttgatacttataacctctggaacacttttacaagacttcagagtttagaaaatgtggcttttaatgttgtaaataagggacactttgatggacaacagggtgaagtaccagtttctatcattaataacactgtttacacaaaagttgatggtgttgatgtagaattgtttgaaaataaaacaacattacctgttaatgtagcatttgagctttgggctaagcgcaacattaaaccagtaccagaggtgaaaatactcaataatttgggtgtggacattgctgctaatactgtgatctgggactacaaaagagatgctccagcacatatatctactattggtgtttgttctatgactgacatagccaagaaaccaactgaaacgatttgtgcaccactcactgtcttttttgatggtagagttgatggtcaagtagacttatttagaaatgcccgtaatggtgttcttattacagaaggtagtgttaaaggtttacaaccatctgtaggtcccaaacaagctagtcttaatggagtcacattaattggagaagccgtaaaaacacagttcaattattataagaaagttgatggtgttgtccaacaattacctgaaacttactttactcagagtagaaatttacaagaatttaaacccaggagtcaaatggaaattgatttcttagaattagctatggatgaattcattgaacggtataaattagaaggctatgccttcgaacatatcgtttatggagattttagtcatagtcagttaggtggtttacatctactgattggactagctaaacgttttaaggaatcaccttttgaattagaagattttattcctatggacagtacagttaaaaactatttcataacagatgcgcaaacaggttcatctaagtgtgtgtgttctgttattgatttattacttgatgattttgttgaaataataaaatcccaagatttatctgtagtttctaaggttgtcaaagtgactattgactatacagaaatttcatttatgctttggtgtaaagatggccatgtagaaacattttacccaaaattacaatctagtcaagcgtggcaaccgggtgttgctatgcctaatctttacaaaatgcaaagaatgctattagaaaagtgtgaccttcaaaattatggtgatagtgcaacattacctaaaggcataatgatgaatgtcgcaaaatatactcaactgtgtcaatatttaaacacattaacattagctgtaccctataatatgagagttatacattttggtgctggttctgataaaggagttgcaccaggtacagctgttttaagacagtggttgcctacgggtacgctgcttgtcgattcagatcttaatgactttgtctctgatgcagattcaactttgattggtgattgtgcaactgtacatacagctaataaatgggatctcattattagtgatatgtacgaccctaagactaaaaatgttacaaaagaaaatgactctaaagagggttttttcacttacatttgtgggtttatacaacaaaagctagctcttggaggttccgtggctataaagataacagaacattcttggaatgctgatctttataagctcatgggacacttcgcatggtggacagcctttgttactaatgtgaatgcgtcatcatctgaagcatttttaattggatgtaattatcttggcaaaccacgcgaacaaatagatggttatgtcatgcatgcaaattacatattttggaggaatacaaatccaattcagttgtcttcctattctttatttgacatgagtaaatttccccttaaattaaggggtactgctgttatgtctttaaaagaaggtcaaatcaatgatatgattttatctcttcttagtaaaggtagacttataattagagaaaacaacagagttgttatttctagtgatgttcttgttaacaactaaacgaacaatgtttgtttttcttgttttattgccactagtctctagtcagtgtgttaatcttacaaccagaactcaattaccccctgcatacactaattctttcacacgtggtgtttattaccctgacaaagttttcagatcctcagttttacattcaactcaggacttgttcttacctttcttttccaatgttacttggttccatgctatacatgtctctgggaccaatggtactaagaggtttgataaccctgtcctaccatttaatgatggtgtttattttgcttccactgagaagtctaacataataagaggctggatttttggtactactttagattcgaagacccagtccctacttattgttaataacgctactaatgttgttattaaagtctgtgaatttcaattttgtaatgatccatttttgggtgtttattaccacaaaaacaacaaaagttggatggaaagtgagttcagagtttattctagtgcgaataattgcacttttgaatatgtctctcagccttttcttatggaccttgaaggaaaacagggtaatttcaaaaatcttagggaatttgtgtttaagaatattgatggttattttaaaatatattctaagcacacgcctattaatttagtgcgtgatctcccccagggtttttcggctttagaaccattggtagatttgccaataggtattaacatcactaggtttcaaactttacttgctttacatagaagttatttgactcctggtgattcttcttcaggttggacagctggtgctgcagcttattatgtgggttatcttcaacctaggacttttctattaaaatataatgaaaatggaaccattacagatgctgtagactgtgcacttgaccctctctcagaaacaaagtgtacgttgaaatccttcactgtagaaaaaggaatctatcaaacttctaactttagagtccaaccaacagaatctattgttagatttcctaatattacaaacttgtgcccttttggtgaagtttttaacgccaccagatttgcatctgtttatgcttggaacaggaagagaatcagcaactgtgttgctgattattctgtcctatataattccgcatcattttccacttttaagtgttatggagtgtctcctactaaattaaatgatctctgctttactaatgtctatgcagattcatttgtaattagaggtgatgaagtcagacaaatcgctccagggcaaactggaaagattgctgattataattataaattaccagatgattttacaggctgcgttatagcttggaattctaacaatcttgattctaaggttggtggtaattataattacctgtatagattgtttaggaagtctaatctcaaaccttttgagagagatatttcaactgaaatctatcaggccggtagcacaccttgtaatggtgttgaaggttttaattgttactttcctttacaatcatatggtttccaacccactaatggtgttggttaccaaccatacagagtagtagtactttcttttgaacttctacatgcaccagcaactgtttgtggacctaaaaagtctactaatttggttaaaaacaaatgtgtcaatttcaacttcaatggtttaacaggcacaggtgttcttactgagtctaacaaaaagtttctgcctttccaacaatttggcagagacattgctgacactactgatgctgtccgtgatccacagacacttgagattcttgacattacaccatgttcttttggtggtgtcagtgttataacaccaggaacaaatacttctaaccaggttgctgttctttatcaggatgttaactgcacagaagtccctgttgctattcatgcagatcaacttactcctacttggcgtgtttattctacaggttctaatgtttttcaaacacgtgcaggctgtttaataggggctgaacatgtcaacaactcatatgagtgtgacatacccattggtgcaggtatatgcgctagttatcagactcagactaattctcctcggcgggcacgtagtgtagctagtcaatccatcattgcctacactatgtcacttggtgcagaaaattcagttgcttactctaataactctattgccatacccacaaattttactattagtgttaccacagaaattctaccagtgtctatgaccaagacatcagtagattgtacaatgtacatttgtggtgattcaactgaatgcagcaatcttttgttgcaatatggcagtttttgtacacaattaaaccgtgctttaactggaatagctgttgaacaagacaaaaacacccaagaagtttttgcacaagtcaaacaaatttacaaaacaccaccaattaaagattttggtggttttaatttttcacaaatattaccagatccatcaaaaccaagcaagaggtcatttattgaagatctacttttcaacaaagtgacacttgcagatgctggcttcatcaaacaatatggtgattgccttggtgatattgctgctagagacctcatttgtgcacaaaagtttaacggccttactgttttgccacctttgctcacagatgaaatgattgctcaatacacttctgcactgttagcgggtacaatcacttctggttggacctttggtgcaggtgctgcattacaaataccatttgctatgcaaatggcttataggtttaatggtattggagttacacagaatgttctctatgagaaccaaaaattgattgccaaccaatttaatagtgctattggcaaaattcaagactcactttcttccacagcaagtgcacttggaaaacttcaagatgtggtcaaccaaaatgcacaagctttaaacacgcttgttaaacaacttagctccaattttggtgcaatttcaagtgttttaaatgatatcctttcacgtcttgacaaagttgaggctgaagtgcaaattgataggttgatcacaggcagacttcaaagtttgcagacatatgtgactcaacaattaattagagctgcagaaatcagagcttctgctaatcttgctgctactaaaatgtcagagtgtgtacttggacaatcaaaaagagttgatttttgtggaaagggctatcatcttatgtccttccctcagtcagcacctcatggtgtagtcttcttgcatgtgacttatgtccctgcacaagaaaagaacttcacaactgctcctgccatttgtcatgatggaaaagcacactttcctcgtgaaggtgtctttgtttcaaatggcacacactggtttgtaacacaaaggaatttttatgaaccacaaatcattactacagacaacacatttgtgtctggtaactgtgatgttgtaataggaattgtcaacaacacagtttatgatcctttgcaacctgaattagactcattcaaggaggagttagataaatattttaagaatcatacatcaccagatgttgatttaggtgacatctctggcattaatgcttcagttgtaaacattcaaaaagaaattgaccgcctcaatgaggttgccaagaatttaaatgaatctctcatcgatctccaagaacttggaaagtatgagcagtatataaaatggccatggtacatttggctaggttttatagctggcttgattgccatagtaatggtgacaattatgctttgctgtatgaccagttgctgtagttgtctcaagggctgttgttcttgtggatcctgctgcaaatttgatgaagacgactctgagccagtgctcaaaggagtcaaattacattacacataaacgaacttatggatttgtttatgagaatcttcacaattggaactgtaactttgaagcaaggtgaaatcaaggatgctactccttcagattttgttcgcgctactgcaacgataccgatacaagcctcactccctttcggatggcttattgttggcgttgcacttcttgctgtttttcagagcgcttccaaaatcataaccctcaaaaagagatggcaactagcactctccaagggtgttcactttgtttgcaacttgctgttgttgtttgtaacagtttactcacaccttttgctcgttgctgctggccttgaagccccttttctctatctttatgctttagtctacttcttgcagagtataaactttgtaagaataataatgaggctttggctttgctggaaatgccgttccaaaaacccattactttatgatgccaactattttctttgctggcatactaattgttacgactattgtataccttacaatagtgtaacttcttcaattgtcattacttcaggtgatggcacaacaagtcctatttctgaacatgactaccagattggtggttatactgaaaaatgggaatctggagtaaaagactgtgttgtattacacagttacttcacttcagactattaccagctgtactcaactcaattgagtacagacactggtgttgaacatgttaccttcttcatctacaataaaattgttgatgagcctgaagaacatgtccaaattcacacaatcgacggttcatccggagttgttaatccagtaatggaaccaatttatgatgaaccgacgacgactactagcgtgcctttgtaagcacaagctgatgagtacgaacttatgtactcattcgtttcggaagagacaggtacgttaatagttaatagcgtacttctttttcttgctttcgtggtattcttgctagttacactagccatccttactgcgcttcgattgtgtgcgtactgctgcaatattgttaacgtgagtcttgtaaaaccttctttttacgtttactctcgtgttaaaaatctgaattcttctagagttcctgatcttctggtctaaacgaactaaatattatattagtttttctgtttggaactttaattttagccatggcagattccaacggtactattaccgttgaagagcttaaaaagctccttgaacaatggaacctagtaataggtttcctattccttacatggatttgtcttctacaatttgcctatgccaacaggaataggtttttgtatataattaagttaattttcctctggctgttatggccagtaactttagcttgttttgtgcttgctgctgtttacagaataaattggatcaccggtggaattgctatcgcaatggcttgtcttgtaggcttgatgtggctcagctacttcattgcttctttcagactgtttgcgcgtacgcgatccatgtggtcattcaatccagaaactaacattcttctcaacgtgccactccatggcactattctgaccagaccgcttctagaaagtgaactcgtaatcggagctgtgatccttcgtggacatcttcgtattgctggacaccatctaggacgctgtgacatcaaggacctgcctaaagaaatcactgttgctacatcacgaacgctttcttattacaaattgggagcttcgcagcgtgtagcaggtgactcaggttttgctgcatacagtcgctacaggattggcaactataaattaaacacagaccattccagtagcagtgacaatattgctttgcttgtacagtaagtgacaacagatgtttcatctcgttgactttcaggttactatagcagagatattactaattattatgaggacttttaaagtttccatttggaatcttgattacatcataaacctcataattaaaaatttatctaagtcactaactgagaataaatattctcaattagatgaagagcaaccaatggagattgattaaacgaacatgaaaattattcttttcttggcactgataacactcgctacttgtgagctttatcactaccaagagtgtgttagaggtacaacagtacttttaaaagaaccttgctcttctggaacatacgagggcaattcaccatttcatcctctagctgataacaaatttgcactgacttgctttagcactcaatttgcttttgcttgtcctgacggcgtaaaacacgtctatcagttacgtgccagatcagtttcacctaaactgttcatcagacaagaggaagttcaagaactttactctccaatttttcttattgttgcggcaatagtgtttataacactttgcttcacactcaaaagaaagacagaatgattgaactttcattaattgacttctatttgtgctttttagcctttctgctattccttgttttaattatgcttattatcttttggttctcacttgaactgcaagatcataatgaaacttgtcacgcctaaacgaacatgaaatttcttgttttcttaggaatcatcacaactgtagctgcatttcaccaagaatgtagtttacagtcatgtactcaacatcaaccatatgtagttgatgacccgtgtcctattcacttctattctaaatggtatattagagtaggagctagaaaatcagcacctttaattgaattgtgcgtggatgaggctggttctaaatcacccattcagtacatcgatatcggtaattatacagtttcctgtttaccttttacaattaattgccaggaacctaaattgggtagtcttgtagtgcgttgttcgttctatgaagactttttagagtatcatgacgttcgtgttgttttagatttcatctaaacgaacaaactaaaatgtctgataatggaccccaaaatcagcgaaatgcaccccgcattacgtttggtggaccctcagattcaactggcagtaaccagaatggagaacgcagtggggcgcgatcaaaacaacgtcggccccaaggtttacccaataatactgcgtcttggttcaccgctctcactcaacatggcaaggaagaccttaaattccctcgaggacaaggcgttccaattaacaccaatagcagtccagatgaccaaattggctactaccgaagagctaccagacgaattcgtggtggtgacggtaaaatgaaagatctcagtccaagatggtatttctactacctaggaactgggccagaagctggacttccctatggtgctaacaaagacggcatcatatgggttgcaactgagggagccttgaatacaccaaaagatcacattggcacccgcaatcctgctaacaatgctgcaatcgtgctacaacttcctcaaggaacaacattgccaaaaggcttctacgcagaagggagcagaggcggcagtcaagcctcttctcgttcctcatcacgtagtcgcaacagttcaagaaattcaactccaggcagcagtaggggaacttctcctgctagaatggctggcaatggcggtgatgctgctcttgctttgctgctgcttgacagattgaaccagcttgagagcaaaatgtctggtaaaggccaacaacaacaaggccaaactgtcactaagaaatctgctgctgaggcttctaagaagcctcggcaaaaacgtactgccactaaagcatacaatgtaacacaagctttcggcagacgtggtccagaacaaacccaaggaaattttggggaccaggaactaatcagacaaggaactgattacaaacattggccgcaaattgcacaatttgcccccagcgcttcagcgttcttcggaatgtcgcgcattggcatggaagtcacaccttcgggaacgtggttgacctacacaggtgccatcaaattggatgacaaagatccaaatttcaaagatcaagtcattttgctgaataagcatattgacgcatacaaaacattcccaccaacagagcctaaaaaggacaaaaagaagaaggctgatgaaactcaagccttaccgcagagacagaagaaacagcaaactgtgactcttcttcctgctgcagatttggatgatttctccaaacaattgcaacaatccatgagcagtgctgactcaactcaggcctaaactcatgcagaccacacaaggcagatgggctatataaacgttttcgcttttccgtttacgatatatagtctactcttgtgcagaatgaattctcgtaactacatagcacaagtagatgtagttaactttaatctcacatagcaatctttaatcagtgtgtaacattagggaggacttgaaagagccaccacattttcaccgaggccacgcggagtacgatcgagtgtacagtgaacaatgctagggagagctgcctatatggaagagccctaatgtgtaaaattaattttagtagtgctatccccatgtgattttaatagcttcttaggagaatgacaaaaaaaaaaaaaaaaaaaaaaaaaaaaaaaaaaaaaaaaaaaaaaaaaaaaaaaaaaagggtcggcatggcatctccacctcctcgcggtccgacctgggcatccgaaggaggacgcacgtccactcggatggctaagggagcagcacactggcggccgttactagggccgcgcccttcccaacagttgcgcagcctgaatggcgaatggagatccaatttttaagtgtataatgtgttaaactactgattctaattgtttgtgtattttagattcacagtcccaaggctcatttcaggcccctcagtcctcacagtctgttcatgatcataatcagccataccacatttgtagaggttttacttgctttaaaaaacctcccacacctccccctgaacctgaaacataaaatgaatgcaattgttgttgttaacttgtttattgcagcttataatggttacaaataaagcaatagcatcacaaatttcacaaataaagcatttttttcactgcattctagttgtggtttgtccaaactcatcaatgtatcttaaagcttgagtattctatagtctcacctaaatagcttggcgtaatcatggtcatagctgtttcctgtgtgaaattgttatccgctcacaattccacacaacatacgagccggaagcataaagtgtaaagcctggggtgcctaatgagtgagctaactcacattaattgcgttgcgctcactgcccgctttccagtcgggaaacctgtcgtgccagctgcattaatgaatcggccaacgcgaaccccttgcggccgcccgggccgtcgaccaattctcatgtttgacagcttatcatcgaatttctgccattcatccgcttattatcacttattcaggcgtagcaaccaggcgtttaagggcaccaataactgccttaaaaaaattacgccccgccctgccactcatcgcagtactgttgtaattcattaagcattctgccgacatggaagccatcacaaacggcatgatgaacctgaatcgccagcggcatcagcaccttgtcgccttgcgtataatatttgcccatggtgaaaacgggggcgaagaagttgtccatattggccacgtttaaatcaaaactggtgaaactcacccagggattggctgagacgaaaaacatattctcaataaaccctttagggaaataggccaggttttcaccgtaacacgccacatcttgcgaatatatgtgtagaaactgccggaaatcgtcgtggtattcactccagagcgatgaaaacgtttcagtttgctcatggaaaacggtgtaacaagggtgaacactatcccatatcaccagctcaccgtctttcattgccatacgaaattccggatgagcattcatcaggcgggcaagaatgtgaataaaggccggataaaacttgtgcttatttttctttacggtctttaaaaaggccgtaatatccagctgaacggtctggttataggtacattgagcaactgactgaaatgcctcaaaatgttctttacgatgccattgggatatatcaacggtggtatatccagtgatttttttctccattttagcttccttagctcctgaaaatctcgataactcaaaaaatacgcccggtagtgatcttatttcattatggtgaaagttggaacctcttacgtgccgatcaacgtctcattttcgccaaaagttggcccagggcttcccggtatcaacagggacaccaggatttatttattctgcgaagtgatcttccgtcacaggtatttattcgcgataagctcatggagcggcgtaaccgtcgcacaggaaggacagagaaagcgcggatctgggaagtgacggacagaacggtcaggacctggattggggaggcggttgccgccgctgctgctgacggtgtgacgttctctgttccggtcacaccacatacgttccgccattcctatgcgatgcacatgctgtatgccggtataccgctgaaagttctgcaaagcctgatgggacataagtccatcagttcaacggaagtctacacgaaggtttttgcgctggatgtggctgcccggcaccgggtgcagtttgcgatgccggagtctgatgcggttgcgatgctgaaacaattatcctgagaataaatgccttggcctttatatggaaatgtggaactgagtggatatgctgtttttgtctgttaaacagagaagctggctgttatccactgagaagcgaacgaaacagtcgggaaaatctcccattatcgtagagatccgcattattaatctcaggagcctgtgtagcgtttataggaagtagtgttctgtcatgatgcctgcaagcggtaacgaaaacgatttgaatatgccttcaggaacaatagaaatcttcgtgcggtgttacgttgaagtggagcggattatgtcagcaatggacagaacaacctaatgaacacagaaccatgatgtggtctgtccttttacagccagtagtgctcgccgcagtcgagcgacagggcgaagccctcggctggttgccctcgccgctgggctggcggccgtctatggccctgcaaacgcgccagaaacgccgtcgaagccgtgtgcgagacaccgcggccggccgccggcgttgtggatacctcgcggaaaacttggccctcactgacagatgaggggcggacgttgacacttgaggggccgactcacccggcgcggcgttgacagatgaggggcaggctcgatttcggccggcgacgtggagctggccagcctcgcaaatcggcgaaaacgcctgattttacgcgagtttcccacagatgatgtggacaagcctggggataagtgccctgcggtattgacacttgaggggcgcgactactgacagatgaggggcgcgatccttgacacttgaggggcagagtgctgacagatgaggggcgcacctattgacatttgaggggctgtccacaggcagaaaatccagcatttgcaagggtttccgcccgtttttcggccaccgctaacctgtcttttaacctgcttttaaaccaatatttataaaccttgtttttaaccagggctgcgccctgtgcgcgtgaccgcgcacgccgaaggggggtgcccccccttctcgaaccctcccggtcgagtgagcgaggaagcaccagggaacagcacttatatattctgcttacacacgatgcctgaaaaaacttcccttggggttatccacttatccacggggatatttttataattattttttttatagtttttagatcttcttttttagagcgccttgtaggcctttatccatgctggttctagagaaggtgttgtgacaaattgccctttcagtgtgacaaatcaccctcaaatgacagtcctgtctgtgacaaattgcccttaaccctgtgacaaattgccctcagaagaagctgttttttcacaaagttatccctgcttattgactcttttttatttagtgtgacaatctaaaaacttgtcacacttcacatggatctgtcatggcggaaacagcggttatcaatcacaagaaacgtaaaaatagcccgcgaatcgtccagtcaaacgacctcactgaggcggcatatagtctctcccgggatcaaaaacgtatgctgtatctgttcgttgaccagatcagaaaatctgatggcaccctacaggaacatgacggtatctgcgagatccatgttgctaaatatgctgaaatattcggattgacctctgcggaagccagtaaggatatacggcaggcattgaagagtttcgcggggaaggaagtggttttttatcgccctgaagaggatgccggcgatgaaaaaggctatgaatcttttccttggtttatcaaacgtgcgcacagtccatccagagggctttacagtgtacatatcaacccatatctcattcccttctttatcgggttacagaaccggtttacgcagtttcggcttagtgaaacaaaagaaatcaccaatccgtatgccatgcgtttatacgaatccctgtgtcagtatcgtaagccggatggctcaggcatcgtctctctgaaaatcgactggatcatagagcgttaccagctgcctcaaagttaccagcgtatgcctgacttccgccgccgcttcctgcaggtctgtgttaatgagatcaacagcagaactccaatgcgcctctcatacattgagaaaaagaaaggccgccagacgactcatatcgtattttccttccgcgatatcacttccatgacgacaggatagtctgagggttatctgtcacagatttgagggtggttcgtcacatttgttctgacctactgagggtaatttgtcacagttttgctgtttccttcagcctgcatggattttctcatactttttgaactgtaatttttaaggaagccaaatttgagggcagtttgtcacagttgatttccttctctttcccttcgtcatgtgacctgatatcgggggttagttcgtcatcattgatgagggttgattatcacagtttattactctgaattggctatccgcgtgtgtacctctacctggagtttttcccacggtggatatttcttcttgcgctgagcgtaagagctatctgacagaacagttcttctttgcttcctcgccagttcgctcgctatgctcggttacacggctgcggcg

SEQ ID NO: 12 - DNA, 35283 bp, Artificial Sequence
  Clone pCCI-4K-SARS-CoV-2-DWDWW. Based on SARS-CoV-2.
gatgtgctgcaaggcgattaagttgggtaacgccagggttttcccagtcacgacgttgtaaaacgacggccagtgaattgtaatacgactcactatagggcgaattctagttattaatagtaatcaattacggggtcattagttcatagcccatatatggagttccgcgttacataacttacggtaaatggcccgcctggctgaccgcccaacgacccccgcccattgacgtcaataatgacgtatgttcccatagtaacgccaatagggactttccattgacgtcaatgggtggagtatttacggtaaactgcccacttggcagtacatcaagtgtatcatatgccaagtacgccccctattgacgtcaatgacggtaaatggcccgcctggcattatgcccagtacatgaccttatgggactttcctacttggcagtacatctacgtattagtcatcgctattaccatggtgatgcggttttggcagtacatcaatgggcgtggatagcggtttgactcacggggatttccaagtctccaccccattgacgtcaatgggagtttgttttggcaccaaaatcaacgggactttccaaaatgtcgtaacaactccgccccattgacgcaaatgggcggtaggcgtgtacggtgggaggtctatataagcagagctggtttagtgaaccgtattaaaggtttataccttcccaggtaacaaaccaaccaactttcgatctcttgtagatctgttctctaaacgaactttaaaatctgtgtggctgtcactcggctgcatgcttagtgcactcacgcagtataattaataactaattactgtcgttgacaggacacgagtaactcgtctatcttctgcaggctgcttacggtttcgtccgtgttgcagccgatcatcagcacatctaggtttcgtccgggtgtgaccgaaaggtaagatggagagccttgtccctggtttcaacgagaaaacacacgtccaactcagtttgcctgttttacaggttcgcgacgtgctcgtacgtggctttggagactccgtggaggaggtcttatcagaggcacgtcaacatcttaaagatggcacttgtggcttagtagaagttgaaaaaggcgttttgcctcaacttgaacagccctatgtgttcatcaaacgttcggatgctcgaactgcacctcatggtcatgttatggttgagctggtagcagaactcgaaggcattcagtacggtcgtagtggtgagacacttggtgtccttgtccctcatgtgggcgaaataccagtggcttaccgcaaggttcttcttcgtaagaacggtaataaaggagctggtggccatagttacggcgccgatctaaagtcatttgacttaggcgacgagcttggcactgatccttatgaagattttcaagaaaactggaacactaaacatagcagtggtgttacccgtgaactcatgcgtgagcttaacggaggggcatacactcgctatgtcgataacaacttctgtggccctgatggctaccctcttgagtgcattaaagaccttctagcacgtgctggtaaagcttcatgcactttgtccgaacaactggactttattgacactaagaggggtgtatactgctgccgtgaacatgagcatgaaattgcttggtacacggaacgttctgaaaagagctatgaattgcagacaccttttgaaattaaattggcaaagaaatttgacaccttcaatggggaatgtccaaattttgtatttcccttaaattccataatcaagactattcaaccaagggttgaaaagaaaaagcttgatggctttatgggtagaattcgatctgtctatccagttgcgtcaccaaatgaatgcaaccaaatgtgcctttcaactctcatgaagtgtgatcattgtggtgaaacttcatggcagacgggcgattttgttaaagccacttgcgaattttgtggcactgagaatttgactaaagaaggtgccactacttgtggttacttaccccaaaatgctgttgttaaaatttattgtccagcatgtcacaattcagaagtaggacctgagcatagtcttgccgaataccataatgaatctggcttgaaaaccattcttcgtaagggtggtcgcactattgcctttggaggctgtgtgttctcttatgttggttgccataacaagtgtgcctattgggtcccgcgtgcgagtgcgaacataggttgtaatcatacgggtgtagtaggtgaaggttcggaaggtctaaatgataatctactagaaatactacaaaaagaaaaagtaaatataaatatagtaggtgattttaaactaaatgaagaaatagcgataatattagcgtcgttttcggcgtcgacgagtgcgtttgtagaaacggtaaaaggtttagattataaagcgtttaaacaaatagtagaatcgtgtggtaattttaaagtgacgaaaggtaaagcgaaaaaaggtgcgtggaatataggtgaacaaaaatcgatactaagtccgctatatgcgtttgcgtcggaagcggcgcgtgtagtacgttcgatattttcgcgtacgctagaaacggcgcaaaattcggtacgtgtattacaaaaagcggcgataacgatactagatggtatatcgcaatattcgctacgtctaatagatgcgatgatgtttacgtcggatttagcgacgaataatctagtagtaatggcgtatataacgggtggtgtagtacaattaacgtcgcaatggctaacgaatatatttggtacggtatatgaaaaactaaaaccggtactagattggctagaagaaaaatttaaagaaggtgtagaatttctacgtgatggttgggaaatagtaaaatttatatcgacgtgtgcgtgtgaaatagtaggtggtcaaatagtaacgtgtgcgaaagaaataaaagaatcggtacaaacgttttttaaactagtaaataaatttctagcgctatgtgcggattcgataataataggtggtgcgaaactaaaagcgctaaatctaggtgaaacgtttgtgacgcattcgaaaggtttatatcgtaaatgtgtaaaatcgcgtgaagaaacgggtctactaatgccgctaaaagcgccgaaagaaataatatttttagaaggtgaaacgctaccgacggaagtattaacggaagaagtagtattaaaaacgggtgatttacaaccgttagaacaaccgacgtcggaagcggtagaagcgccgttagtaggtacgccggtatgtataaatggtctaatgttactagaaataaaagatacggaaaaatattgtgcgctagcgccgaatatgatggtaacgaataatacgtttacgctaaaaggtggtgcgccgacgaaagtaacgtttggtgatgatacggtaatagaagtacaaggttataaatcggtaaatataacgtttgaactagatgaacgtatagataaagtactaaatgaaaaatgttcggcgtatacggtagaactaggtacggaagtaaatgaatttgcgtgtgtagtagcggatgcggtaataaaaacgttacaaccggtatcggaattactaacgccgctaggtatagatttagatgaatggtcgatggcgacgtattatttatttgatgaatcgggtgaatttaaattagcgtcgcatatgtattgttcgttttatccgccggatgaagatgaagaagaaggtgattgtgaagaagaagaatttgaaccgtcgacgcaatatgaatatggtacggaagatgattatcaaggtaaaccgttagaatttggtgcgacgtcggcggcgctacaaccggaagaagaacaagaagaagattggttggatgatgattcgcaacaaacggtaggtcaacaagatggttcggaagataatcaaacgacgacgatacaaacgatagtagaagtacaaccgcaattagaaatggaactaacgccggtagtacaaacgatagaagtaaattcgttttcgggttatttaaaactaacggataatgtatatataaaaaatgcggatatagtagaagaagcgaaaaaagtaaaaccgacggtagtagtaaatgcggcgaatgtatatctaaaacatggtggtggtgtagcgggtgcgttaaataaagcgacgaataatgcgatgcaagtagaatcggatgattatatagcgacgaatggtccgctaaaagtaggtggttcgtgtgtattatcgggtcataatctagcgaaacattgtctacatgtagtaggtccgaatgtaaataaaggtgaagatatacaactactaaaatcggcgtatgaaaattttaatcaacatgaagtactactagcgccgttattatcggcgggtatatttggtgcggacccgatacattcgttacgtgtgtgtgtagatacggtacgcacgaatgtatatttagcggtatttgataaaaatctatatgataaactagtatcgtcgtttttagaaatgaaatcggaaaaacaagtagaacaaaaaatagcggaaataccgaaagaagaagtaaaaccgtttataacggaatcgaaaccgtcggtagaacaacgtaaacaagatgataaaaaaataaaagcgtgtgtagaagaagtaacgacgacgctagaagaaacgaaatttctaacagaaaatttattactatatatagatataaatggtaatctacatccggattcggcgacgctagtatcggatatagatataacgtttttaaaaaaagatgcgccgtatatagtaggtgatgtagtacaagaaggtgtattaacggcggtagtaataccgacgaaaaaagcgggtggtacgacggaaatgctggcgaaagcgttacgtaaagtaccgacggataattatataacgacgtacccgggtcagggtttaaatggttacactgtagaggaggcaaagacagtgcttaaaaagtgtaaaagtgccttttacattctaccatctattatctctaatgagaagcaagaaattcttggaactgtttcttggaatttgcgagaaatgcttgcacatgcagaagaaacacgcaaattaatgcctgtctgtgtggaaactaaagccatagtttcaactatacagcgtaaatataagggtattaaaatacaagagggtgtggttgattatggtgctagattttacttttacaccagtaaaacaactgtagcgtcacttatcaacacacttaacgatctaaatgaaactcttgttacaatgccacttggctatgtaacacatggcttaaatttggaagaagctgctcggtatatgagatctctcaaagtgccagctacagtttctgtttcttcacctgatgctgttacagcgtataatggttatcttacttcttcttctaaaacacctgaagaacattttattgaaaccatctcacttgctggttcctataaagattggtcctattctggacaatctacacaactaggtatagaatttcttaagagaggtgataaaagtgtatattacactagtaatcctaccacattccacctagatggtgaagttatcacctttgacaatcttaagacacttctttctttgagagaagtgaggactattaaggtgtttacaacagtagacaacattaacctccacacgcaagttgtggacatgtcaatgacatatggacaacagtttggtccaacttatttggatggagctgatgttactaaaataaaacctcataattcacatgaaggtaaaacattttatgttttacctaatgatgacactctacgtgttgaggcttttgagtactaccacacaactgatcctagttttctgggtaggtacatgtcagcattaaatcacactaaaaagtggaaatacccacaagttaatggtttaacttctattaaatgggcagataacaactgttatcttgccactgcattgttaacactccaacaaatagagttgaagtttaatccacctgctctacaagatgcttattacagagcaagggctggtgaagctgctaacttttgtgcacttatcttagcctactgtaataagacagtaggtgagttaggtgatgttagagaaacaatgagttacttgtttcaacatgccaatttagattcttgcaaaagagtcttgaacgtggtgtgtaaaacttgtggacaacagcagacaacccttaagggtgtagaagctgttatgtacatgggcacactttcttatgaacaatttaagaaaggtgttcagataccttgtacgtgtggtaaacaagctacaaaatatctagtacaacaggagtcaccttttgttatgatgtcagcaccacctgctcagtatgaacttaagcatggtacatttacttgtgctagtgagtacactggtaattaccagtgtggtcactataaacatataacttctaaagaaactttgtattgcatagacggtgctttacttacaaagtcctcagaatacaaaggtcctattacggatgttttctacaaagaaaacagttacacaacaaccataaaaccagttacttataaattggatggtgttgtttgtacagaaattgaccctaagttggacaattattataagaaagacaattcttatttcacagagcaaccaattgatcttgtaccaaaccaaccatatccaaacgcaagcttcgataattttaagtttgtatgtgataatatcaaatttgctgatgatttaaaccagttaactggttataagaaacctgcttcaagagagcttaaagttacatttttccctgacttaaatggtgatgtggtggctattgattataaacactacacaccctcttttaagaaaggagctaaattgttacataaacctattgtttggcatgttaacaatgcaactaataaagccacgtataaaccaaatacctggtgtatacgttgtctttggagcacaaaaccagttgaaacatcaaattcgtttgatgtactgaagtcagaggacgcgcagggaatggataatcttgcctgcgaagatctaaaaccagtctctgaagaagtagtggaaaatcctaccatacagaaagacgttcttgagtgtaatgtgaaaactaccgaagttgtaggagacattatacttaaaccagcaaataatagtttaaaaattacagaagaggttggccacacagatctaatggctgcttatgtagacaattctagtcttactattaagaaacctaatgaattatctagagtattaggtttgaaaacccttgctactcatggtttagctgctgttaatagtgtcccttgggatactatagctaattatgctaagccttttcttaacaaagttgttagtacaactactaacatagttacacggtgtttaaaccgtgtttgtactaattatatgccttatttctttactttattgctacaattgtgtacttttactagaagtacaaattctagaattaaagcatctatgccgactactatagcaaagaatactgttaagagtgtcggtaaattttgtctagaggcttcatttaattatttgaagtcacctaatttttctaaactgataaatattataatttggtttttactattaagtgtttgcctaggttcgttaatatattcgacggcggcgttaggtgtattaatgtcgaatttaggtatgccgtcgtattgtacgggttatcgtgaaggttatttaaattcgacgaatgtaacgatagcgacgtattgtacgggttcgataccgtgttcggtatgtctatcgggtttagattcgttagatacgtatccgtcgttagaaacgatacaaataacgatatcgtcgtttaaatgggatttaacggcgtttggtttagtagcggaatggtttttagcgtatatactatttacgcgatttttttatgtactaggtttagcggcgataatgcaattatttttttcgtattttgcggtacattttatttcgaattcgtggctaatgtggttaataataaatctagtacaaatggcgccgatatcggcgatggtacgtatgtatatattttttgcgtcgttttattatgtatggaaatcgtatgtacatgtagtagatggttgtaattcgtcgacgtgtatgatgtgttataaacgtaatcgtgcgacgcgagtagaatgtacgacgatagtaaatggtgtacgtcgttcgttttatgtatatgcgaatggtggtaaaggtttttgtaaactacataattggaattgtgtaaattgtgatacgttttgtgcgggttcgacgtttatatcggatgaagtagcgcgtgatttatcgctacaatttaaacgtccgataaatccgacggatcaatcgtcgtatatagtagattcggtaacggtaaaaaatggttcgatacatctatattttgataaagcgggtcaaaaaacgtatgaacgtcattcgctatcgcattttgtaaatttagataatctacgtgcgaataatacgaaaggttcgttaccgataaatgtaatagtatttgatggtaaatcgaaatgtgaagaatcgtcggcgaaatcggcgtcggtatattattcgcaactaatgtgtcaaccgatactattactagatcaagcgttagtatcggatgtaggtgattcggcggaagtagcggtaaaaatgtttgatgcgtatgtaaatacgttttcgtcgacgtttaatgtaccgatggaaaaactaaaaacgctagtagcgacggcggaagcggaactagcgaaaaatgtatctttagataatgtattatcgacgtttatatcggcggcgcgtcaaggttttgtagattcggatgtagaaacgaaagatgtagtagaatgtctaaaattatcgcatcaatcggatatagaagtaacgggtgattcgtgtaataattatatgctaacgtataataaagtagaaaatatgacgccgcgtgatctaggtgcgtgtatagattgttcggcgcgtcatataaatgcgcaagtagcgaaatcgcataatatagcgttaatatggaatgtaaaagattttatgtcgttatcggaacaactacgtaaacaaatacgttcggcggcgaaaaaaaataatttaccgtttaaattaacgtgtgcgacgacgcgacaagtagtaaatgtagtaacgacgaaaatagcgctaaaaggtggtaaaatagtaaataattggttaaaacaattaattaaagttacacttgtgttcctttttgttgctgctattttctatttaataacacctgttcatgtcatgtctaaacatactgacttttcaagtgaaatcataggatacaaggctattgatggtggtgtcactcgtgacatagcatctacagatacttgttttgctaacaaacatgctgattttgacacatggtttagccagcgtggtggtagttatactaatgacaaagcttgcccattgattgctgcagtcataacaagagaagtgggttttgtcgtgcctggtttgcctggcacgatattacgcacaactaatggtgactttttgcatttcttacctagagtttttagtgcagttggtaacatctgttacacaccatcaaaacttatagagtacactgactttgcaacatcagcttgtgttttggctgctgaatgtacaatttttaaagatgcttctggtaagccagtaccatattgttatgataccaatgtactagaaggttctgttgcttatgaaagtttacgccctgacacacgttatgtgctcatggatggctctattattcaatttcctaacacctaccttgaaggttctgttagagtggtaacaacttttgattctgagtactgtaggcacggcacttgtgaaagatcagaagctggtgtttgtgtatctactagtggtagatgggtacttaacaatgattattacagatctttaccaggagttttctgtggtgtagatgctgtaaatttacttactaatatgtttacaccactaattcaacctattggtgctttggacatatcagcatctatagtagctggtggtattgtagctatcgtagtaacatgccttgcctactattttatgaggtttagaagagcttttggtgaatacagtcatgtagttgcctttaatactttactattccttatgtcattcactgtactctgtttaacaccagtttactcattcttacctggtgtttattctgttatttacttgtacttgacattttatcttactaatgatgtttcttttttagcacatattcagtggatggttatgttcacacctttagtacctttctggataacaattgcttatatcatttgtatttccacaaagcatttctattggttctttagtaattacctaaagagacgtgtagtctttaatggtgtttcctttagtacttttgaagaagctgcgctgtgcacctttttgttaaataaagaaatgtatctaaagttgcgtagtgatgtgctattacctcttacgcaatataatagatacttagctctttataataagtacaagtattttagtggagcaatggatacaactagctacagagaagctgcttgttgtcatctcgcaaaggctctcaatgacttcagtaactcaggttctgatgttctttaccaaccaccacaaacctctatcacctcagctgttttgcagagtggttttagaaaaatggcattcccatctggtaaagttgagggttgtatggtacaagtaacttgtggtacaactacacttaacggtctttggcttgatgacgtagtttactgtccaagacatgtgatctgcacctctgaagacatgcttaaccctaattatgaagatttactcattcgtaagtctaatcataatttcttggtacaggctggtaatgttcaactcagggttattggacattctatgcaaaattgtgtacttaagcttaaggttgatacagccaatcctaagacacctaagtataagtttgttcgcattcaaccaggacagactttttcagtgttagcttgttacaatggttcaccatctggtgtttaccaatgtgctatgaggcccaatttcactattaagggttcattccttaatggttcatgtggtagtgttggttttaacatagattatgactgtgtctctttttgttacatgcaccatatggaattaccaactggagttcatgctggcacagacttagaaggtaacttttatggaccttttgttgacaggcaaacagcacaagcagctggtacggacacaactattacagttaatgttttagcttggttgtacgctgctgttataaatggagacaggtggtttctcaatcgatttaccacaactcttaatgactttaaccttgtggctatgaagtacaattatgaacctctaacacaagaccatgttgacatactaggacctctttctgctcaaactggaattgccgttttagatatgtgtgcttcattaaaagaattactgcaaaatggtatgaatggacgtaccatattgggtagtgctttattagaagatgaatttacaccttttgatgttgttagacaatgctcaggtgttactttccaaagtgcagtgaaaagaacaatcaagggtacacaccactggttgttactcacaattttgacttcacttttagttttagtccagagtactcaatggtctttgttcttttttttgtatgaaaatgcctttttaccttttgctatgggtattattgctatgtctgcttttgcaatgatgtttgtcaaacataagcatgcatttctctgtttgtttttgttaccttctcttgccactgtagcttattttaatatggtctatatgcctgctagttgggtgatgcgtattatgacatggttggatatggttgatactagtttgtctggttttaagctaaaagactgtgttatgtatgcatcagctgtagtgttactaatccttatgacagcaagaactgtgtatgatgatggtgctaggagagtgtggacacttatgaatgtcttgacactcgtttataaagtttattatggtaatgctttagatcaagccatttccatgtgggctcttataatctctgttacttctaactactcaggtgtagttacaactgtcatgtttttggccagaggtattgtttttatgtgtgttgagtattgccctattttcttcataactggtaatacacttcagtgtataatgctagtttattgtttcttaggctatttttgtacttgttactttggcctcttttgtttactcaaccgctactttagactgactcttggtgtttatgattacttagtttctacacaggagtttagatatatgaattcacagggactactcccacccaagaatagcatagatgccttcaaactcaacattaaattgttgggtgttggtggcaaaccttgtatcaaagtagccactgtacagtctaaaatgtcagatgtaaagtgcacatcagtagtcttactctcagttttgcaacaactcagagtagaatcatcatctaaattgtgggctcaatgtgtccagttacacaatgacattctcttagctaaagatactactgaagcctttgaaaaaatggtttcactactttctgttttgctttccatgcagggtgctgtagacataaacaagctttgtgaagaaatgctggacaacagggcaaccttacaagctatagcctcagagtttagttcccttccatcatatgcagcttttgctactgctcaagaagcttatgagcaggctgttgctaatggtgattctgaagttgttcttaaaaagttgaagaagtctttgaatgtggctaaatctgaatttgaccgtgatgcagccatgcaacgtaagttggaaaagatggctgatcaagctatgacccaaatgtataaacaggctagatctgaggacaagagggcaaaagttactagtgctatgcagacaatgcttttcactatgcttagaaagttggataatgatgcactcaacaacattatcaacaatgcaagagatggttgtgttcccttgaacataatacctcttacaacagcagccaaactaatggttgtcataccagactataacacatataaaaatacgtgtgatggtacaacatttacttatgcatcagcattgtgggaaatccaacaggttgtagatgcagatagtaaaattgttcaacttagtgaaattagtatggacaattcacctaatttagcatggcctcttattgtaacagctttaagggccaattctgctgtcaaattacagaataatgagcttagtcctgttgcactacgacagatgtcttgtgctgccggtactacacaaactgcttgcactgatgacaatgcgttagcttactacaacacaacaaagggaggtaggtttgtacttgcactgttatccgatttacaggatttgaaatgggctagattccctaagagtgatggaactggtactatctatacagaactggaaccaccttgtaggtttgttacagacacacctaaaggtcctaaagtgaagtatttatactttattaaaggattaaacaacctaaatagaggtatggtacttggtagtttagctgccacagtacgtctacaagctggtaatgcaacagaagtgcctgccaattcaactgtattatctttctgtgcttttgctgtagatgctgctaaagcttacaaagattatctagctagtgggggacaaccaatcactaattgtgttaagatgttgtgtacacacactggtactggtcaggcaataacagttacaccggaagccaatatggatcaagaatcctttggtggtgcatcgtgttgtctgtactgccgttgccacatagatcatccaaatcctaaaggattttgtgacttaaaaggtaagtatgtacaaatacctacaacttgtgctaatgaccctgtgggttttacacttaaaaacacagtctgtaccgtctgcggtatgtggaaaggttatggctgtagttgtgatcaactccgcgaacccatgcttcagtcagctgatgcacaatcgtttttaaacgggtttgcggtgtaagtgcagcccgtcttacaccgtgcggcacaggcactagtactgatgtcgtatacagggcttttgacatctacaatgataaagtagctggttttgctaaattcctaaaaactaattgttgtcgcttccaagaaaaggacgaagatgacaatttaattgattcttactttgtagttaagagacacactttctctaactaccaacatgaagaaacaatttataatttacttaaggattgtccagctgttgctaaacatgacttctttaagtttagaatagacggtgacatggtaccacatatatcacgtcaacgtcttactaaatacacaatggcagacctcgtctatgctttaaggcattttgatgaaggtaattgtgacacattaaaagaaatacttgtcacatacaattgttgtgatgatgattatttcaataaaaaggactggtatgattttgtagaaaacccagatatattacgcgtatacgccaacttaggtgaacgtgtacgccaagctttgttaaaaacagtacaattctgtgatgccatgcgaaatgctggtattgttggtgtactgacattagataatcaagatctcaatggtaactggtatgatttcggtgatttcatacaaaccacgccaggtagtggagttcctgttgtagattcttattattcattgttaatgcctatattaaccttgaccagggctttaactgcagagtcacatgttgacactgacttaacaaagccttacattaagtgggatttgttaaaatatgacttcacggaagagaggttaaaactctttgaccgttattttaaatattgggatcagacataccacccaaattgtgttaactgtttggatgacagatgcattctgcattgtgcaaactttaatgttttattctctacagtgttcccacctacaagttttggaccactagtgagaaaaatatttgttgatggtgttccatttgtagtttcaactggataccacttcagagagctaggtgttgtacataatcaggatgtaaacttacatagctctagacttagttttaaggaattacttgtgtatgctgctgaccctgctatgcacgctgcttctggtaatctattactagataaacgcactacgtgcttttcagtagctgcacttactaacaatgttgcttttcaaactgtcaaacccggtaattttaacaaagacttctatgactttgctgtgtctaagggtttctttaaggaaggaagttctgttgaattaaaacacttcttctttgctcaggatggtaatgctgctatcagcgattatgactactatcgttataatctaccaacaatgtgtgatatcagacaactactatttgtagttgaagttgttgataagtactttgattgttacgatggtggctgtattaatgctaaccaagtcatcgtcaacaacctagacaaatcagctggttttccatttaataaatggggtaaggctagactttattatgattcaatgagttatgaggatcaagatgcacttttcgcatatacaaaacgtaatgtcatccctactataactcaaatgaatcttaagtatgccattagtgcaaagaatagagctcgcaccgtagctggtgtctctatctgtagtactatgaccaatagacagtttcatcaaaaattattgaaatcaatagccgccactagaggagctactgtagtaattggaacaagcaaattctatggtggttggcacaacatgttaaaaactgtttatagtgatgtagaaaaccctcaccttatgggttgggattatcctaaatgtgatagagccatgcctaacatgcttagaattatggcctcacttgttcttgctcgcaaacatacaacgtgttgtagcttgtcacaccgtttctatagattagctaatgagtgtgctcaagtattgagtgaaatggtcatgtgtggcggttcactatatgttaaaccaggtggaacctcatcaggagatgccacaactgcttatgctaatagtgtttttaacatttgtcaagctgtcacggccaatgttaatgcacttttatctactgatggtaacaaaattgccgataagtatgtccgcaatttacaacacagactttatgagtgtctctatagaaatagagatgttgacacagactttgtgaatgagttttacgcatatttgcgtaaacatttctcaatgatgatactctctgacgatgctgttgtgtgtttcaatagcacttatgcatctcaaggtctagtggctagcataaagaactttaagtcagttctttattatcaaaacaatgtttttatgtctgaagcaaaatgttggactgagactgaccttactaaaggacctcatgaattttgctctcaacatacaatgctagttaaacagggtgatgattatgtgtaccttccttacccagatccatcaagaatcctaggggccggctgttttgtagatgatatcgtaaaaacagatggtacacttatgattgaacggttcgtgtctttagctatagatgcttacccacttactaaacatcctaatcaggagtatgctgatgtctttcatttgtacttacaatacataagaaagctacatgatgagttaacaggacacatgttagacatgtattctgttatgcttactaatgataacacttcaaggtattgggaacctgagttttatgaggctatgtacacaccgcatacagtcttacaggctgttggggcttgtgttctttgcaattcacagacttcattaagatgtggtgcttgcatacgtagaccattcttatgttgtaaatgctgttacgaccatgtcatatcaacatcacataaattagtcttgtctgttaatccgtatgtttgcaatgctccaggttgtgatgtcacagatgtgactcaactttacttaggaggtatgagctattattgtaaatcacataaaccacccattagttttccattgtgtgctaatggacaagtttttggtttatataaaaatacatgtgttggtagcgataatgttactgactttaatgcaattgcaacatgtgactggacaaatgctggtgattacattttagctaacacctgtactgaaagactcaagctttttgcagcagaaacgctcaaagctactgaggagacatttaaactgtcttatggtattgctactgtacgtgaagtgctgtctgacagagaattacatctttcatgggaagttggtaaacctagaccaccacttaaccgaaattatgtctttactggttatcgtgtaactaaaaacagtaaagtacaaataggagagtacacctttgaaaaaggtgactatggtgatgctgttgtttaccgaggtacaacaacttacaaattaaatgttggtgattattttgtgctgacatcacatacagtaatgccattaagtgcacctacactagtgccacaagagcactatgttagaattactggcttatacccaacactcaatatctcagatgagttttctagcaatgttgcaaattatcaaaaggttggtatgcaaaagtattctacactccagggaccacctggtactggtaagagtcattttgctattggcctagctctctactacccttctgctcgcatagtgtatacagcttgctctcatgccgctgttgatgcactatgtgagaaggcattaaaatatttgcctatagataaatgtagtagaattatacctgcacgtgctcgtgtagagtgttttgataaattcaaagtgaattcaacattagaacagtatgtcttttgtactgtaaatgcattgcctgagacgacagcagatatagttgtctttgatgaaatttcaatggccacaaattatgatttgagtgttgtcaatgccagattacgtgctaagcactatgtgtacattggcgaccctgctcaattacctgcaccacgcacattgctaactaagggcacactagaaccagaatatttcaattcagtgtgtagacttatgaaaactataggtccagacatgttcctcggaacttgtcggcgttgtcctgctgaaattgttgacactgtgagtgctttggtttatgataataagcttaaagcacataaagacaaatcagctcaatgctttaaaatgttttataagggtgttatcacgcatgatgtttcatctgcaattaacaggccacaaataggcgtggtaagagaattccttacacgtaaccctgcttggagaaaagctgtctttatttcaccttataattcacagaatgctgtagcctcaaagattttgggactaccaactcaaactgttgattcatcacagggctcagaatatgactatgtcatattcactcaaaccactgaaacagctcactcttgtaatgtaaacagatttaatgttgctattaccagagcaaaagtaggcatactttgcataatgtctgatagagacctttatgacaagttgcaatttacaagtcttgaaattccacgtaggaatgtggcaactttacaagctgaaaatgtaacaggactctttaaagattgtagtaaggtaatcactgggttacatcctacacaggcacctacacacctcagtgttgacactaaattcaaaactgaaggtttatgtgttgacatacctggcatacctaaggacatgacctatagaagactcatctctatgatgggttttaaaatgaattatcaagttaatggttaccctaacatgtttatcacccgcgaagaagctataagacatgtacgtgcatggattggcttcgatgtcgaggggtgtcatgctactagagaagctgttggtaccaatttacctttacagctaggtttttctacaggtgttaacctagttgctgtacctacaggttatgttgatacacctaataatacagatttttccagagttagtgctaaaccaccgcctggagatcaatttaaacacctcataccacttatgtacaaaggacttccttggaatgtagtgcgtataaagattgtacaaatgttaagtgacacacttaaaaatctctctgacagagtcgtatttgtcttatgggcacatggctttgagttgacatctatgaagtattttgtgaaaataggacctgagcgcacctgttgtctatgtgatagacgtgccacatgcttttccactgcttcagacacttatgcctgttggcatcattctattggatttgattacgtctataatccgtttatgattgatgttcaacaatggggttttacaggtaacctacaaagcaaccatgatctgtattgtcaagtccatggtaatgcacatgtagctagttgtgatgcaatcatgactaggtgtctagctgtccacgagtgctttgttaagcgtgttgactggactattgaatatcctataattggtgatgaactgaagattaatgcggcttgtagaaaggttcaacacatggttgttaaagctgcattattagcagacaaattcccagttcttcacgacattggtaaccctaaagctattaagtgtgtacctcaagctgatgtagaatggaagttctatgatgcacagccttgtagtgacaaagcttataaaatagaagaattattctattcttatgccacacattctgacaaattcacagatggtgtatgcctattttggaattgcaatgtcgatagatatcctgctaattccattgtttgtagatttgacactagagtgctatctaaccttaacttgcctggttgtgatggtggcagtttgtatgtaaataaacatgcattccacacaccagcttttgataaaagtgcttttgttaatttaaaacaattaccatttttctattactctgacagtccatgtgagtctcatggaaaacaagtagtgtcagatatagattatgtaccactaaagtctgctacgtgtataacacgttgcaatttaggtggtgctgtctgtagacatcatgctaatgagtacagattgtatctcgatgcttataacatgatgatctcagctggctttagcttgtgggtttacaaacaatttgatacttataacctctggaacacttttacaagacttcagagtttagaaaatgtggcttttaatgttgtaaataagggacactttgatggacaacagggtgaagtaccagtttctatcattaataacactgtttacacaaaagttgatggtgttgatgtagaattgtttgaaaataaaacaacattacctgttaatgtagcatttgagctttgggctaagcgcaacattaaaccagtaccagaggtgaaaatactcaataatttgggtgtggacattgctgctaatactgtgatctgggactacaaaagagatgctccagcacatatatctactattggtgtttgttctatgactgacatagccaagaaaccaactgaaacgatttgtgcaccactcactgtcttttttgatggtagagttgatggtcaagtagacttatttagaaatgcccgtaatggtgttcttattacagaaggtagtgttaaaggtttacaaccatctgtaggtcccaaacaagctagtcttaatggagtcacattaattggagaagccgtaaaaacacagttcaattattataagaaagttgatggtgttgtccaacaattacctgaaacttactttactcagagtagaaatttacaagaatttaaacccaggagtcaaatggaaattgatttcttagaattagctatggatgaattcattgaacggtataaattagaaggctatgccttcgaacatatcgtttatggagattttagtcatagtcagttaggtggtttacatctactgattggactagctaaacgttttaaggaatcaccttttgaattagaagattttattcctatggacagtacagttaaaaactatttcataacagatgcgcaaacaggttcatctaagtgtgtgtgttctgttattgatttattacttgatgattttgttgaaataataaaatcccaagatttatctgtagtttctaaggttgtcaaagtgactattgactatacagaaatttcatttatgctttggtgtaaagatggccatgtagaaacattttacccaaaattacaatctagtcaagcgtggcaaccgggtgttgctatgcctaatctttacaaaatgcaaagaatgctattagaaaagtgtgaccttcaaaattatggtgatagtgcaacattacctaaaggcataatgatgaatgtcgcaaaatatactcaactgtgtcaatatttaaacacattaacattagctgtaccctataatatgagagttatacattttggtgctggttctgataaaggagttgcaccaggtacagctgttttaagacagtggttgcctacgggtacgctgcttgtcgattcagatcttaatgactttgtctctgatgcagattcaactttgattggtgattgtgcaactgtacatacagctaataaatgggatctcattattagtgatatgtacgaccctaagactaaaaatgttacaaaagaaaatgactctaaagagggttttttcacttacatttgtgggtttatacaacaaaagctagctcttggaggttccgtggctataaagataacagaacattcttggaatgctgatctttataagctcatgggacacttcgcatggtggacagcctttgttactaatgtgaatgcgtcatcatctgaagcatttttaattggatgtaattatcttggcaaaccacgcgaacaaatagatggttatgtcatgcatgcaaattacatattttggaggaatacaaatccaattcagttgtcttcctattctttatttgacatgagtaaatttccccttaaattaaggggtactgctgttatgtctttaaaagaaggtcaaatcaatgatatgattttatctcttcttagtaaaggtagacttataattagagaaaacaacagagttgttatttctagtgatgttcttgttaacaactaaacgaacaatgtttgtttttcttgttttattgccactagtctctagtcagtgtgttaatcttacaaccagaactcaattaccccctgcatacactaattctttcacacgtggtgtttattaccctgacaaagttttcagatcctcagttttacattcaactcaggacttgttcttacctttcttttccaatgttacttggttccatgctatacatgtctctgggaccaatggtactaagaggtttgataaccctgtcctaccatttaatgatggtgtttattttgcttccactgagaagtctaacataataagaggctggatttttggtactactttagattcgaagacccagtccctacttattgttaataacgctactaatgttgttattaaagtctgtgaatttcaattttgtaatgatccatttttgggtgtttattaccacaaaaacaacaaaagttggatggaaagtgagttcagagtttattctagtgcgaataattgcacttttgaatatgtctctcagccttttcttatggaccttgaaggaaaacagggtaatttcaaaaatcttagggaatttgtgtttaagaatattgatggttattttaaaatatattctaagcacacgcctattaatttagtgcgtgatctcccccagggtttttcggctttagaaccattggtagatttgccaataggtattaacatcactaggtttcaaactttacttgctttacatagaagttatttgactcctggtgattcttcttcaggttggacagctggtgctgcagcttattatgtgggttatcttcaacctaggacttttctattaaaatataatgaaaatggaaccattacagatgctgtagactgtgcacttgaccctctctcagaaacaaagtgtacgttgaaatccttcactgtagaaaaaggaatctatcaaacttctaactttagagtccaaccaacagaatctattgttagatttcctaatattacaaacttgtgcccttttggtgaagtttttaacgccaccagatttgcatctgtttatgcttggaacaggaagagaatcagcaactgtgttgctgattattctgtcctatataattccgcatcattttccacttttaagtgttatggagtgtctcctactaaattaaatgatctctgctttactaatgtctatgcagattcatttgtaattagaggtgatgaagtcagacaaatcgctccagggcaaactggaaagattgctgattataattataaattaccagatgattttacaggctgcgttatagcttggaattctaacaatcttgattctaaggttggtggtaattataattacctgtatagattgtttaggaagtctaatctcaaaccttttgagagagatatttcaactgaaatctatcaggccggtagcacaccttgtaatggtgttgaaggttttaattgttactttcctttacaatcatatggtttccaacccactaatggtgttggttaccaaccatacagagtagtagtactttcttttgaacttctacatgcaccagcaactgtttgtggacctaaaaagtctactaatttggttaaaaacaaatgtgtcaatttcaacttcaatggtttaacaggcacaggtgttcttactgagtctaacaaaaagtttctgcctttccaacaatttggcagagacattgctgacactactgatgctgtccgtgatccacagacacttgagattcttgacattacaccatgttcttttggtggtgtcagtgttataacaccaggaacaaatacttctaaccaggttgctgttctttatcaggatgttaactgcacagaagtccctgttgctattcatgcagatcaacttactcctacttggcgtgtttattctacaggttctaatgtttttcaaacacgtgcaggctgtttaataggggctgaacatgtcaacaactcatatgagtgtgacatacccattggtgcaggtatatgcgctagttatcagactcagactaattctcctcggcgggcacgtagtgtagctagtcaatccatcattgcctacactatgtcacttggtgcagaaaattcagttgcttactctaataactctattgccatacccacaaattttactattagtgttaccacagaaattctaccagtgtctatgaccaagacatcagtagattgtacaatgtacatttgtggtgattcaactgaatgcagcaatcttttgttgcaatatggcagtttttgtacacaattaaaccgtgctttaactggaatagctgttgaacaagacaaaaacacccaagaagtttttgcacaagtcaaacaaatttacaaaacaccaccaattaaagattttggtggttttaatttttcacaaatattaccagatccatcaaaaccaagcaagaggtcatttattgaagatctacttttcaacaaagtgacacttgcagatgctggcttcatcaaacaatatggtgattgccttggtgatattgctgctagagacctcatttgtgcacaaaagtttaacggccttactgttttgccacctttgctcacagatgaaatgattgctcaatacacttctgcactgttagcgggtacaatcacttctggttggacctttggtgcaggtgctgcattacaaataccatttgctatgcaaatggcttataggtttaatggtattggagttacacagaatgttctctatgagaaccaaaaattgattgccaaccaatttaatagtgctattggcaaaattcaagactcactttcttccacagcaagtgcacttggaaaacttcaagatgtggtcaaccaaaatgcacaagctttaaacacgcttgttaaacaacttagctccaattttggtgcaatttcaagtgttttaaatgatatcctttcacgtcttgacaaagttgaggctgaagtgcaaattgataggttgatcacaggcagacttcaaagtttgcagacatatgtgactcaacaattaattagagctgcagaaatcagagcttctgctaatcttgctgctactaaaatgtcagagtgtgtacttggacaatcaaaaagagttgatttttgtggaaagggctatcatcttatgtccttccctcagtcagcacctcatggtgtagtcttcttgcatgtgacttatgtccctgcacaagaaaagaacttcacaactgctcctgccatttgtcatgatggaaaagcacactttcctcgtgaaggtgtctttgtttcaaatggcacacactggtttgtaacacaaaggaatttttatgaaccacaaatcattactacagacaacacatttgtgtctggtaactgtgatgttgtaataggaattgtcaacaacacagtttatgatcctttgcaacctgaattagactcattcaaggaggagttagataaatattttaagaatcatacatcaccagatgttgatttaggtgacatctctggcattaatgcttcagttgtaaacattcaaaaagaaattgaccgcctcaatgaggttgccaagaatttaaatgaatctctcatcgatctccaagaacttggaaagtatgagcagtatataaaatggccatggtacatttggctaggttttatagctggcttgattgccatagtaatggtgacaattatgctttgctgtatgaccagttgctgtagttgtctcaagggctgttgttcttgtggatcctgctgcaaatttgatgaagacgactctgagccagtgctcaaaggagtcaaattacattacacataaacgaacttatggatttgtttatgagaatcttcacaattggaactgtaactttgaagcaaggtgaaatcaaggatgctactccttcagattttgttcgcgctactgcaacgataccgatacaagcctcactccctttcggatggcttattgttggcgttgcacttcttgctgtttttcagagcgcttccaaaatcataaccctcaaaaagagatggcaactagcactctccaagggtgttcactttgtttgcaacttgctgttgttgtttgtaacagtttactcacaccttttgctcgttgctgctggccttgaagccccttttctctatctttatgctttagtctacttcttgcagagtataaactttgtaagaataataatgaggctttggctttgctggaaatgccgttccaaaaacccattactttatgatgccaactattttctttgctggcatactaattgttacgactattgtataccttacaatagtgtaacttcttcaattgtcattacttcaggtgatggcacaacaagtcctatttctgaacatgactaccagattggtggttatactgaaaaatgggaatctggagtaaaagactgtgttgtattacacagttacttcacttcagactattaccagctgtactcaactcaattgagtacagacactggtgttgaacatgttaccttcttcatctacaataaaattgttgatgagcctgaagaacatgtccaaattcacacaatcgacggttcatccggagttgttaatccagtaatggaaccaatttatgatgaaccgacgacgactactagcgtgcctttgtaagcacaagctgatgagtacgaacttatgtactcattcgtttcggaagagacaggtacgttaatagttaatagcgtacttctttttcttgctttcgtggtattcttgctagttacactagccatccttactgcgcttcgattgtgtgcgtactgctgcaatattgttaacgtgagtcttgtaaaaccttctttttacgtttactctcgtgttaaaaatctgaattcttctagagttcctgatcttctggtctaaacgaactaaatattatattagtttttctgtttggaactttaattttagccatggcagattccaacggtactattaccgttgaagagcttaaaaagctccttgaacaatggaacctagtaataggtttcctattccttacatggatttgtcttctacaatttgcctatgccaacaggaataggtttttgtatataattaagttaattttcctctggctgttatggccagtaactttagcttgttttgtgcttgctgctgtttacagaataaattggatcaccggtggaattgctatcgcaatggcttgtcttgtaggcttgatgtggctcagctacttcattgcttctttcagactgtttgcgcgtacgcgatccatgtggtcattcaatccagaaactaacattcttctcaacgtgccactccatggcactattctgaccagaccgcttctagaaagtgaactcgtaatcggagctgtgatccttcgtggacatcttcgtattgctggacaccatctaggacgctgtgacatcaaggacctgcctaaagaaatcactgttgctacatcacgaacgctttcttattacaaattgggagcttcgcagcgtgtagcaggtgactcaggttttgctgcatacagtcgctacaggattggcaactataaattaaacacagaccattccagtagcagtgacaatattgctttgcttgtacagtaagtgacaacagatgtttcatctcgttgactttcaggttactatagcagagatattactaattattatgaggacttttaaagtttccatttggaatcttgattacatcataaacctcataattaaaaatttatctaagtcactaactgagaataaatattctcaattagatgaagagcaaccaatggagattgattaaacgaacatgaaaattattcttttcttggcactgataacactcgctacttgtgagctttatcactaccaagagtgtgttagaggtacaacagtacttttaaaagaaccttgctcttctggaacatacgagggcaattcaccatttcatcctctagctgataacaaatttgcactgacttgctttagcactcaatttgcttttgcttgtcctgacggcgtaaaacacgtctatcagttacgtgccagatcagtttcacctaaactgttcatcagacaagaggaagttcaagaactttactctccaatttttcttattgttgcggcaatagtgtttataacactttgcttcacactcaaaagaaagacagaatgattgaactttcattaattgacttctatttgtgctttttagcctttctgctattccttgttttaattatgcttattatcttttggttctcacttgaactgcaagatcataatgaaacttgtcacgcctaaacgaacatgaaatttcttgttttcttaggaatcatcacaactgtagctgcatttcaccaagaatgtagtttacagtcatgtactcaacatcaaccatatgtagttgatgacccgtgtcctattcacttctattctaaatggtatattagagtaggagctagaaaatcagcacctttaattgaattgtgcgtggatgaggctggttctaaatcacccattcagtacatcgatatcggtaattatacagtttcctgtttaccttttacaattaattgccaggaacctaaattgggtagtcttgtagtgcgttgttcgttctatgaagactttttagagtatcatgacgttcgtgttgttttagatttcatctaaacgaacaaactaaaatgtctgataatggaccccaaaatcagcgaaatgcaccccgcattacgtttggtggaccctcagattcaactggcagtaaccagaatggagaacgcagtggggcgcgatcaaaacaacgtcggccccaaggtttacccaataatactgcgtcttggttcaccgctctcactcaacatggcaaggaagaccttaaattccctcgaggacaaggcgttccaattaacaccaatagcagtccagatgaccaaattggctactaccgaagagctaccagacgaattcgtggtggtgacggtaaaatgaaagatctcagtccaagatggtatttctactacctaggaactgggccagaagctggacttccctatggtgctaacaaagacggcatcatatgggttgcaactgagggagccttgaatacaccaaaagatcacattggcacccgcaatcctgctaacaatgctgcaatcgtgctacaacttcctcaaggaacaacattgccaaaaggcttctacgcagaagggagcagaggcggcagtcaagcctcttctcgttcctcatcacgtagtcgcaacagttcaagaaattcaactccaggcagcagtaggggaacttctcctgctagaatggctggcaatggcggtgatgctgctcttgctttgctgctgcttgacagattgaaccagcttgagagcaaaatgtctggtaaaggccaacaacaacaaggccaaactgtcactaagaaatctgctgctgaggcttctaagaagcctcggcaaaaacgtactgccactaaagcatacaatgtaacacaagctttcggcagacgtggtccagaacaaacccaaggaaattttggggaccaggaactaatcagacaaggaactgattacaaacattggccgcaaattgcacaatttgcccccagcgcttcagcgttcttcggaatgtcgcgcattggcatggaagtcacaccttcgggaacgtggttgacctacacaggtgccatcaaattggatgacaaagatccaaatttcaaagatcaagtcattttgctgaataagcatattgacgcatacaaaacattcccaccaacagagcctaaaaaggacaaaaagaagaaggctgatgaaactcaagccttaccgcagagacagaagaaacagcaaactgtgactcttcttcctgctgcagatttggatgatttctccaaacaattgcaacaatccatgagcagtgctgactcaactcaggcctaaactcatgcagaccacacaaggcagatgggctatataaacgttttcgcttttccgtttacgatatatagtctactcttgtgcagaatgaattctcgtaactacatagcacaagtagatgtagttaactttaatctcacatagcaatctttaatcagtgtgtaacattagggaggacttgaaagagccaccacattttcaccgaggccacgcggagtacgatcgagtgtacagtgaacaatgctagggagagctgcctatatggaagagccctaatgtgtaaaattaattttagtagtgctatccccatgtgattttaatagcttcttaggagaatgacaaaaaaaaaaaaaaaaaaaaaaaaaaaaaaaaaaaaaaaaaaaaaaaaaaaaaaaaaaagggtcggcatggcatctccacctcctcgcggtccgacctgggcatccgaaggaggacgcacgtccactcggatggctaagggagcagcacactggcggccgttactagggccgcgcccttcccaacagttgcgcagcctgaatggcgaatggagatccaatttttaagtgtataatgtgttaaactactgattctaattgtttgtgtattttagattcacagtcccaaggctcatttcaggcccctcagtcctcacagtctgttcatgatcataatcagccataccacatttgtagaggttttacttgctttaaaaaacctcccacacctccccctgaacctgaaacataaaatgaatgcaattgttgttgttaacttgtttattgcagcttataatggttacaaataaagcaatagcatcacaaatttcacaaataaagcatttttttcactgcattctagttgtggtttgtccaaactcatcaatgtatcttaaagcttgagtattctatagtctcacctaaatagcttggcgtaatcatggtcatagctgtttcctgtgtgaaattgttatccgctcacaattccacacaacatacgagccggaagcataaagtgtaaagcctggggtgcctaatgagtgagctaactcacattaattgcgttgcgctcactgcccgctttccagtcgggaaacctgtcgtgccagctgcattaatgaatcggccaacgcgaaccccttgcggccgcccgggccgtcgaccaattctcatgtttgacagcttatcatcgaatttctgccattcatccgcttattatcacttattcaggcgtagcaaccaggcgtttaagggcaccaataactgccttaaaaaaattacgccccgccctgccactcatcgcagtactgttgtaattcattaagcattctgccgacatggaagccatcacaaacggcatgatgaacctgaatcgccagcggcatcagcaccttgtcgccttgcgtataatatttgcccatggtgaaaacgggggcgaagaagttgtccatattggccacgtttaaatcaaaactggtgaaactcacccagggattggctgagacgaaaaacatattctcaataaaccctttagggaaataggccaggttttcaccgtaacacgccacatcttgcgaatatatgtgtagaaactgccggaaatcgtcgtggtattcactccagagcgatgaaaacgtttcagtttgctcatggaaaacggtgtaacaagggtgaacactatcccatatcaccagctcaccgtctttcattgccatacgaaattccggatgagcattcatcaggcgggcaagaatgtgaataaaggccggataaaacttgtgcttatttttctttacggtctttaaaaaggccgtaatatccagctgaacggtctggttataggtacattgagcaactgactgaaatgcctcaaaatgttctttacgatgccattgggatatatcaacggtggtatatccagtgatttttttctccattttagcttccttagctcctgaaaatctcgataactcaaaaaatacgcccggtagtgatcttatttcattatggtgaaagttggaacctcttacgtgccgatcaacgtctcattttcgccaaaagttggcccagggcttcccggtatcaacagggacaccaggatttatttattctgcgaagtgatcttccgtcacaggtatttattcgcgataagctcatggagcggcgtaaccgtcgcacaggaaggacagagaaagcgcggatctgggaagtgacggacagaacggtcaggacctggattggggaggcggttgccgccgctgctgctgacggtgtgacgttctctgttccggtcacaccacatacgttccgccattcctatgcgatgcacatgctgtatgccggtataccgctgaaagttctgcaaagcctgatgggacataagtccatcagttcaacggaagtctacacgaaggtttttgcgctggatgtggctgcccggcaccgggtgcagtttgcgatgccggagtctgatgcggttgcgatgctgaaacaattatcctgagaataaatgccttggcctttatatggaaatgtggaactgagtggatatgctgtttttgtctgttaaacagagaagctggctgttatccactgagaagcgaacgaaacagtcgggaaaatctcccattatcgtagagatccgcattattaatctcaggagcctgtgtagcgtttataggaagtagtgttctgtcatgatgcctgcaagcggtaacgaaaacgatttgaatatgccttcaggaacaatagaaatcttcgtgcggtgttacgttgaagtggagcggattatgtcagcaatggacagaacaacctaatgaacacagaaccatgatgtggtctgtccttttacagccagtagtgctcgccgcagtcgagcgacagggcgaagccctcggctggttgccctcgccgctgggctggcggccgtctatggccctgcaaacgcgccagaaacgccgtcgaagccgtgtgcgagacaccgcggccggccgccggcgttgtggatacctcgcggaaaacttggccctcactgacagatgaggggcggacgttgacacttgaggggccgactcacccggcgcggcgttgacagatgaggggcaggctcgatttcggccggcgacgtggagctggccagcctcgcaaatcggcgaaaacgcctgattttacgcgagtttcccacagatgatgtggacaagcctggggataagtgccctgcggtattgacacttgaggggcgcgactactgacagatgaggggcgcgatccttgacacttgaggggcagagtgctgacagatgaggggcgcacctattgacatttgaggggctgtccacaggcagaaaatccagcatttgcaagggtttccgcccgtttttcggccaccgctaacctgtcttttaacctgcttttaaaccaatatttataaaccttgtttttaaccagggctgcgccctgtgcgcgtgaccgcgcacgccgaaggggggtgcccccccttctcgaaccctcccggtcgagtgagcgaggaagcaccagggaacagcacttatatattctgcttacacacgatgcctgaaaaaacttcccttggggttatccacttatccacggggatatttttataattattttttttatagtttttagatcttcttttttagagcgccttgtaggcctttatccatgctggttctagagaaggtgttgtgacaaattgccctttcagtgtgacaaatcaccctcaaatgacagtcctgtctgtgacaaattgcccttaaccctgtgacaaattgccctcagaagaagctgttttttcacaaagttatccctgcttattgactcttttttatttagtgtgacaatctaaaaacttgtcacacttcacatggatctgtcatggcggaaacagcggttatcaatcacaagaaacgtaaaaatagcccgcgaatcgtccagtcaaacgacctcactgaggcggcatatagtctctcccgggatcaaaaacgtatgctgtatctgttcgttgaccagatcagaaaatctgatggcaccctacaggaacatgacggtatctgcgagatccatgttgctaaatatgctgaaatattcggattgacctctgcggaagccagtaaggatatacggcaggcattgaagagtttcgcggggaaggaagtggttttttatcgccctgaagaggatgccggcgatgaaaaaggctatgaatcttttccttggtttatcaaacgtgcgcacagtccatccagagggctttacagtgtacatatcaacccatatctcattcccttctttatcgggttacagaaccggtttacgcagtttcggcttagtgaaacaaaagaaatcaccaatccgtatgccatgcgtttatacgaatccctgtgtcagtatcgtaagccggatggctcaggcatcgtctctctgaaaatcgactggatcatagagcgttaccagctgcctcaaagttaccagcgtatgcctgacttccgccgccgcttcctgcaggtctgtgttaatgagatcaacagcagaactccaatgcgcctctcatacattgagaaaaagaaaggccgccagacgactcatatcgtattttccttccgcgatatcacttccatgacgacaggatagtctgagggttatctgtcacagatttgagggtggttcgtcacatttgttctgacctactgagggtaatttgtcacagttttgctgtttccttcagcctgcatggattttctcatactttttgaactgtaatttttaaggaagccaaatttgagggcagtttgtcacagttgatttccttctctttcccttcgtcatgtgacctgatatcgggggttagttcgtcatcattgatgagggttgattatcacagtttattactctgaattggctatccgcgtgtgtacctctacctggagtttttcccacggtggatatttcttcttgcgctgagcgtaagagctatctgacagaacagttcttctttgcttcctcgccagttcgctcgctatgctcggttacacggctgcggcg

SEQ ID NO: 13 - DNA, 35283 bp, Artificial Sequence
  Clone pCCI-4K-SARS-CoV-2-DWWDD. Based on SARS-CoV-2.
gatgtgctgcaaggcgattaagttgggtaacgccagggttttcccagtcacgacgttgtaaaacgacggccagtgaattgtaatacgactcactatagggcgaattctagttattaatagtaatcaattacggggtcattagttcatagcccatatatggagttccgcgttacataacttacggtaaatggcccgcctggctgaccgcccaacgacccccgcccattgacgtcaataatgacgtatgttcccatagtaacgccaatagggactttccattgacgtcaatgggtggagtatttacggtaaactgcccacttggcagtacatcaagtgtatcatatgccaagtacgccccctattgacgtcaatgacggtaaatggcccgcctggcattatgcccagtacatgaccttatgggactttcctacttggcagtacatctacgtattagtcatcgctattaccatggtgatgcggttttggcagtacatcaatgggcgtggatagcggtttgactcacggggatttccaagtctccaccccattgacgtcaatgggagtttgttttggcaccaaaatcaacgggactttccaaaatgtcgtaacaactccgccccattgacgcaaatgggcggtaggcgtgtacggtgggaggtctatataagcagagctggtttagtgaaccgtattaaaggtttataccttcccaggtaacaaaccaaccaactttcgatctcttgtagatctgttctctaaacgaactttaaaatctgtgtggctgtcactcggctgcatgcttagtgcactcacgcagtataattaataactaattactgtcgttgacaggacacgagtaactcgtctatcttctgcaggctgcttacggtttcgtccgtgttgcagccgatcatcagcacatctaggtttcgtccgggtgtgaccgaaaggtaagatggagagccttgtccctggtttcaacgagaaaacacacgtccaactcagtttgcctgttttacaggttcgcgacgtgctcgtacgtggctttggagactccgtggaggaggtcttatcagaggcacgtcaacatcttaaagatggcacttgtggcttagtagaagttgaaaaaggcgttttgcctcaacttgaacagccctatgtgttcatcaaacgttcggatgctcgaactgcacctcatggtcatgttatggttgagctggtagcagaactcgaaggcattcagtacggtcgtagtggtgagacacttggtgtccttgtccctcatgtgggcgaaataccagtggcttaccgcaaggttcttcttcgtaagaacggtaataaaggagctggtggccatagttacggcgccgatctaaagtcatttgacttaggcgacgagcttggcactgatccttatgaagattttcaagaaaactggaacactaaacatagcagtggtgttacccgtgaactcatgcgtgagcttaacggaggggcatacactcgctatgtcgataacaacttctgtggccctgatggctaccctcttgagtgcattaaagaccttctagcacgtgctggtaaagcttcatgcactttgtccgaacaactggactttattgacactaagaggggtgtatactgctgccgtgaacatgagcatgaaattgcttggtacacggaacgttctgaaaagagctatgaattgcagacaccttttgaaattaaattggcaaagaaatttgacaccttcaatggggaatgtccaaattttgtatttcccttaaattccataatcaagactattcaaccaagggttgaaaagaaaaagcttgatggctttatgggtagaattcgatctgtctatccagttgcgtcaccaaatgaatgcaaccaaatgtgcctttcaactctcatgaagtgtgatcattgtggtgaaacttcatggcagacgggcgattttgttaaagccacttgcgaattttgtggcactgagaatttgactaaagaaggtgccactacttgtggttacttaccccaaaatgctgttgttaaaatttattgtccagcatgtcacaattcagaagtaggacctgagcatagtcttgccgaataccataatgaatctggcttgaaaaccattcttcgtaagggtggtcgcactattgcctttggaggctgtgtgttctcttatgttggttgccataacaagtgtgcctattgggtcccgcgtgcgagtgcgaacataggttgtaatcatacgggtgtagtaggtgaaggttcggaaggtctaaatgataatctactagaaatactacaaaaagaaaaagtaaatataaatatagtaggtgattttaaactaaatgaagaaatagcgataatattagcgtcgttttcggcgtcgacgagtgcgtttgtagaaacggtaaaaggtttagattataaagcgtttaaacaaatagtagaatcgtgtggtaattttaaagtgacgaaaggtaaagcgaaaaaaggtgcgtggaatataggtgaacaaaaatcgatactaagtccgctatatgcgtttgcgtcggaagcggcgcgtgtagtacgttcgatattttcgcgtacgctagaaacggcgcaaaattcggtacgtgtattacaaaaagcggcgataacgatactagatggtatatcgcaatattcgctacgtctaatagatgcgatgatgtttacgtcggatttagcgacgaataatctagtagtaatggcgtatataacgggtggtgtagtacaattaacgtcgcaatggctaacgaatatatttggtacggtatatgaaaaactaaaaccggtactagattggctagaagaaaaatttaaagaaggtgtagaatttctacgtgatggttgggaaatagtaaaatttatatcgacgtgtgcgtgtgaaatagtaggtggtcaaatagtaacgtgtgcgaaagaaataaaagaatcggtacaaacgttttttaaactagtaaataaatttctagcgctatgtgcggattcgataataataggtggtgcgaaactaaaagcgctaaatctaggtgaaacgtttgtgacgcattcgaaaggtttatatcgtaaatgtgtaaaatcgcgtgaagaaacgggtctactaatgccgctaaaagcgccgaaagaaataatatttttagaaggtgaaacgctaccgacggaagtattaacggaagaagtagtattaaaaacgggtgatttacaaccgttagaacaaccgacgtcggaagcggtagaagcgccgttagtaggtacgccggtatgtataaatggtctaatgttactagaaataaaagatacggaaaaatattgtgcgctagcgccgaatatgatggtaacgaataatacgtttacgctaaaaggtggtgcgccgacgaaagtaacgtttggtgatgatacggtaatagaagtacaaggttataaatcggtaaatataacgtttgaactagatgaacgtatagataaagtactaaatgaaaaatgttcggcgtatacggtagaactaggtacggaagtaaatgaatttgcgtgtgtagtagcggatgcggtaataaaaacgttacaaccggtatcggaattactaacgccgctaggtatagatttagatgaatggtcgatggcgacgtattatttatttgatgaatcgggtgaatttaaattagcgtcgcatatgtattgttcgttttatccgccggatgaagatgaagaagaaggtgattgtgaagaagaagaatttgaaccgtcgacgcaatatgaatatggtacggaagatgattatcaaggtaaaccgttagaatttggtgcgacgtcggcggcgctacaaccggaagaagaacaagaagaagattggttggatgatgattcgcaacaaacggtaggtcaacaagatggttcggaagataatcaaacgacgacgatacaaacgatagtagaagtacaaccgcaattagaaatggaactaacgccggtagtacaaacgatagaagtaaattcgttttcgggttatttaaaactaacggataatgtatatataaaaaatgcggatatagtagaagaagcgaaaaaagtaaaaccgacggtagtagtaaatgcggcgaatgtatatctaaaacatggtggtggtgtagcgggtgcgttaaataaagcgacgaataatgcgatgcaagtagaatcggatgattatatagcgacgaatggtccgctaaaagtaggtggttcgtgtgtattatcgggtcataatctagcgaaacattgtctacatgtagtaggtccgaatgtaaataaaggtgaagatatacaactactaaaatcggcgtatgaaaattttaatcaacatgaagtactactagcgccgttattatcggcgggtatatttggtgcggacccgatacattcgttacgtgtgtgtgtagatacggtacgcacgaatgtatatttagcggtatttgataaaaatctatatgataaactagtatcgtcgtttttagaaatgaaatcggaaaaacaagtagaacaaaaaatagcggaaataccgaaagaagaagtaaaaccgtttataacggaatcgaaaccgtcggtagaacaacgtaaacaagatgataaaaaaataaaagcgtgtgtagaagaagtaacgacgacgctagaagaaacgaaatttctaacagaaaatttattactatatatagatataaatggtaatctacatccggattcggcgacgctagtatcggatatagatataacgtttttaaaaaaagatgcgccgtatatagtaggtgatgtagtacaagaaggtgtattaacggcggtagtaataccgacgaaaaaagcgggtggtacgacggaaatgctggcgaaagcgttacgtaaagtaccgacggataattatataacgacgtacccgggtcagggtttaaatggttacactgtagaggaggcaaagacagtgcttaaaaagtgtaaaagtgccttttacattctaccatctattatctctaatgagaagcaagaaattcttggaactgtttcttggaatttgcgagaaatgcttgcacatgcagaagaaacacgcaaattaatgcctgtctgtgtggaaactaaagccatagtttcaactatacagcgtaaatataagggtattaaaatacaagagggtgtggttgattatggtgctagattttacttttacaccagtaaaacaactgtagcgtcacttatcaacacacttaacgatctaaatgaaactcttgttacaatgccacttggctatgtaacacatggcttaaatttggaagaagctgctcggtatatgagatctctcaaagtgccagctacagtttctgtttcttcacctgatgctgttacagcgtataatggttatcttacttcttcttctaaaacacctgaagaacattttattgaaaccatctcacttgctggttcctataaagattggtcctattctggacaatctacacaactaggtatagaatttcttaagagaggtgataaaagtgtatattacactagtaatcctaccacattccacctagatggtgaagttatcacctttgacaatcttaagacacttctttctttgagagaagtgaggactattaaggtgtttacaacagtagacaacattaacctccacacgcaagttgtggacatgtcaatgacatatggacaacagtttggtccaacttatttggatggagctgatgttactaaaataaaacctcataattcacatgaaggtaaaacattttatgttttacctaatgatgacactctacgtgttgaggcttttgagtactaccacacaactgatcctagttttctgggtaggtacatgtcagcattaaatcacactaaaaagtggaaatacccacaagttaatggtttaacttctattaaatgggcagataacaactgttatcttgccactgcattgttaacactccaacaaatagagttgaagtttaatccacctgctctacaagatgcttattacagagcaagggctggtgaagctgctaacttttgtgcacttatcttagcctactgtaataagacagtaggtgagttaggtgatgttagagaaacaatgagttacttgtttcaacatgccaatttagattcttgcaaaagagtcttgaacgtggtgtgtaaaacttgtggacaacagcagacaacccttaagggtgtagaagctgttatgtacatgggcacactttcttatgaacaatttaagaaaggtgttcagataccttgtacgtgtggtaaacaagctacaaaatatctagtacaacaggagtcaccttttgttatgatgtcagcaccacctgctcagtatgaacttaagcatggtacatttacttgtgctagtgagtacactggtaattaccagtgtggtcactataaacatataacttctaaagaaactttgtattgcatagacggtgctttacttacaaagtcctcagaatacaaaggtcctattacggatgttttctacaaagaaaacagttacacaacaaccataaaaccagttacttataaattggatggtgttgtttgtacagaaattgaccctaagttggacaattattataagaaagacaattcttatttcacagagcaaccaattgatcttgtaccaaaccaaccatatccaaacgcaagcttcgataattttaagtttgtatgtgataatatcaaatttgctgatgatttaaaccagttaactggttataagaaacctgcttcaagagagcttaaagttacatttttccctgacttaaatggtgatgtggtggctattgattataaacactacacaccctcttttaagaaaggagctaaattgttacataaacctattgtttggcatgttaacaatgcaactaataaagccacgtataaaccaaatacctggtgtatacgttgtctttggagcacaaaaccagttgaaacatcaaattcgtttgatgtactgaagtcagaggacgcgcagggaatggataatcttgcctgcgaagatctaaaaccagtctctgaagaagtagtggaaaatcctaccatacagaaagacgttcttgagtgtaatgtgaaaactaccgaagttgtaggagacattatacttaaaccagcaaataatagtttaaaaattacagaagaggttggccacacagatctaatggctgcttatgtagacaattctagtcttactattaagaaacctaatgaattatctagagtattaggtttgaaaacccttgctactcatggtttagctgctgttaatagtgtcccttgggatactatagctaattatgctaagccttttcttaacaaagttgttagtacaactactaacatagttacacggtgtttaaaccgtgtttgtactaattatatgccttatttctttactttattgctacaattgtgtacttttactagaagtacaaattctagaattaaagcatctatgccgactactatagcaaagaatactgttaagagtgtcggtaaattttgtctagaggcttcatttaattatttgaagtcacctaatttttctaaactgataaatattataatttggtttttactattaagtgtttgcctaggttctttaatctactcaaccgctgctttaggtgttttaatgtctaatttaggcatgccttcttactgtactggttacagagaaggctatttgaactctactaatgtcactattgcaacctactgtactggttctataccttgtagtgtttgtcttagtggtttagattctttagacacctatccttctttagaaactatacaaattaccatttcatcttttaaatgggatttaactgcttttggcttagttgcagagtggtttttggcatatattcttttcactaggtttttctatgtacttggattggctgcaatcatgcaattgtttttcagctattttgcagtacattttattagtaattcttggcttatgtggttaataattaatcttgtacaaatggccccgatttcagctatggttagaatgtacatcttctttgcatcattttattatgtatggaaaagttatgtgcatgttgtagacggttgtaattcatcaacttgtatgatgtgttacaaacgtaatagagcaacaagagtcgaatgtacaactattgttaatggtgttagaaggtccttttatgtctatgctaatggaggtaaaggcttttgcaaactacacaattggaattgtgttaattgtgatacattctgtgctggtagtacatttattagtgatgaagttgcgagagacttgtcactacagtttaaaagaccaataaatcctactgaccagtcttcttacatcgttgatagtgttacagtgaagaatggttccatccatctttactttgataaagctggtcaaaagacttatgaaagacattctctctctcattttgttaacttagacaacctgagagctaataacactaaaggttcattgcctattaatgttatagtttttgatggtaaatcaaaatgtgaagaatcatctgcaaaatcagcgtctgtttactacagtcagcttatgtgtcaacctatactgttactagatcaggcattagtgtctgatgttggtgatagtgcggaagttgcagttaaaatgtttgatgcttacgttaatacgttttcatcaacttttaacgtaccaatggaaaaactcaaaacactagttgcaactgcagaagctgaacttgcaaagaatgtgtccttagacaatgtcttatctacttttatttcagcagctcggcaagggtttgttgattcagatgtagaaactaaagatgttgttgaatgtcttaaattgtcacatcaatctgacatagaagttactggcgatagttgtaataactatatgctcacctataacaaagttgaaaacatgacaccccgtgaccttggtgcttgtattgactgtagtgcgcgtcatattaatgcgcaggtagcaaaaagtcacaacattgctttgatatggaacgttaaagatttcatgtcattgtctgaacaactacgaaaacaaatacgtagtgctgctaaaaagaataacttaccttttaagttgacatgtgcaactactagacaagttgttaatgttgtaacaacaaagatagcacttaagggtggtaaaattgttaataattggttgaagcagttaattaaagtaacgctagtatttctatttgtagcggcgatattttatttaataacgccggtacatgtaatgtcgaaacatacggatttttcgtcggaaataataggttataaagcgatagatggtggtgtaactcgtgatatagcgtcgacggatacgtgttttgcgaataaacatgcggattttgatacgtggttttcgcaacgtggtggttcgtatacgaatgataaagcgtgtccgttaatagcggcggtaataacacgtgaagtaggttttgtagtaccgggtttaccgggtacgatattacgtacgacgaatggtgattttttacattttttaccgcgtgtattttcggcggtaggtaatatatgttatacgccgtcgaaactaatagaatatacggattttgcgacgtcggcgtgtgtattagcggcggaatgtacgatatttaaagatgcgtcgggtaaaccggtaccgtattgttatgatacgaatgtactagaaggttcggtagcgtatgaatcgttacgcccggatacacgttatgtactaatggatggttcgataatacaatttccgaatacgtatctagaaggttcggtacgtgtagtaacgacgtttgattcggaatattgtcgtcatggtacgtgtgaacgttcggaagcgggtgtatgtgtatcgacgtcggggcgttgggtactaaataatgattattatcgttcgttaccgggtgtattctgtggtgtagatgcggtaaatttactaacgaatatgtttacgccgctgatacaaccgataggtgcgttagatatatcggcgtcgatagtagcgggtggtatagtagcgatagtagtaacgtgtctagcgtattattttatgcgttttcgtcgtgcgtttggtgaatattcgcatgtagtagcgtttaatacgttactatttctaatgtcttttacagtactatgtttaacgccggtatattcttttttaccgggtgtatattcggtaatatatttatatttaacgttttatctaacgaatgatgtatcgtttttagcgcatatacaatggatggtaatgtttacgccgttagtaccgttttggataacaatagcgtatataatatgtatatcgacgaaacatttttattggtttttttcgaattatctgaaacgtcgtgtagtatttaatggtgtatctttttcgacgtttgaagaagcggcgctatgtacatttttattaaataaagaaatgtatctaaaattacgttcggatgtactattaccgctaacgcaatataatcgttatttagcgctatataataaatataaatatttttcgggtgcgatggatacgacgtcgtatcgtgaagcggcgtgttgtcatctagcgaaagcgctaaatgatttttcgaattcgggttcggatgtactatatcaaccgccgcaaacgtcgataacgtcggcggtattacaatcgggttttcgtaaaatggcgtttccgtcgggtaaagtagaaggttgtatggtacaagtaacgtgtggtacgacgacgctaaatggtctatggctagatgatgtagtatattgtccgcgtcatgtaatatgtacgtcggaagatatgctaaatccgaattatgaagatttactaatacgtaaatcgaatcataattttttagtacaagcgggtaatgtacaactacgtgtaataggtcattcgatgcaaaattgtgtactaaaactaaaagtagatacggcgaatccgaaaacaccgaaatataaatttgtacgtatacaaccgggtcaaacgttttcggtattagcgtgttataatggttctccgtcgggtgtatatcaatgtgcgatgcgtccgaattttacgattaaaggttcgtttctaaatggttcgtgtggttcggtaggttttaatatagattatgattgtgtatcgttttgttatatgcatcatatggaattaccgacgggtgtacatgcgggtacggatttagaaggtaatttttatggtccgtttgtagatcgtcaaacagcgcaagcggcgggtacggatacgacgattacggtaaatgtattagcgtggttatatgcggcggtaataaatggtgatcgttggtttctaaatcgttttacgacgacgctaaatgattttaatctagtagcgatgaaatataattatgaaccgctgacacaagatcatgtagatatactaggtccgctatcggcgcaaacgggtatagcggtattagatatgtgtgcgtcgttaaaagaattactacaaaatggtatgaatggtcgtacgatattaggttcggcgttattagaagatgaatttacgccgtttgatgtagtacgtcaatgttcgggtgtaacgtttcaatcggcggtaaaacgtacgataaaaggtacgcatcattggttattactaacgatattaacgtcgctattagtattagtacaatcgacgcaatggtcgttatttttttttttatatgaaaatgcgtttttaccgtttgcgatgggtataatagcgatgtcggcgtttgcgatgatgtttgtaaaacataagcatgcgtttctatgtttatttttattaccgtcgctagcgacggtagcgtattttaatatggtatatatgccggcgtcgtgggtaatgcgtataatgacgtggttagatatggtagatacgtcgttatcgggttttaaactaaaagattgtgtaatgtatgcgtcggcggtagtattactaatactaatgacggcgcgtacggtatatgatgatggtgcgcgtcgtgtatggacgctaatgaatgtattaacgctagtatataaagtatattatgggaatgcgttagatcaagcgatatcgatgtgggcgctaataatatcggtaacgtcgaattattcgggtgtagtaacgacggtaatgtttttagcgcgtggtatagtatttatgtgtgtagaatattgtccgatattttttataacgggtaatacactacaatgtataatgctagtatattgttttttaggttatttttgtacgtgttattttggtctattttgtttactaaatcgttattttcgtctaacactaggtgtatatgattatttagtatcgacgcaagaatttcgttatatgaattcgcaaggtctactaccgccgaaaaattcgatagatgcgtttaaactaaatataaaattattaggtgtaggtggtaaaccgtgtataaaagtagcgacggtacaatcgaaaatgtcggatgtaaaatgtacatcggtagtattactatcggtattacaacaactacgtgtagaatcgtcgtcgaaattatgggcgcaatgtgtacaattacataatgatatactattagcgaaagatacgacggaagcgtttgaaaaaatggtatcgctactatcggtattactatcgatgcaaggtgcggtagatataaataaactatgtgaagaaatgctagataatcgtgcgacgttacaagcgatagcgtcggaattttcgtcgctaccgtcgtatgcggcgtttgcgacggcgcaagaagcgtatgaacaagcggtagcgaatggtgattcggaagtagtactaaaaaaattaaaaaaatcgttaaatgtagcgaaatcggaatttgatcgtgatgcggcgatgcaacgtaaattagaaaaaatggcggatcaagcgatgacgcaaatgtataaacaagcgcgttcggaagataaacgtgcgaaagtaacgtcggcgatgcaaacgatgctatttacgatgctacgtaaattagataatgatgcgctaaataatataataaataatgcgcgtgatggttgtgtaccgttaaatataataccgctaacgacggcggcgaaactaatggtagtaataccggattataatacatataaaaatacgtgtgatggtacgacgtttacgtatgcgtcggcgttatgggaaatacaacaagtagtagatgcggattcgaaaatagtacaactatcggaaatatcgatggataattcgccgaatttagcgtggccgctaatagtaacggcgttacgtgcgaattcggcggtaaaattacaaaataatgaactatcgccggtagcgctacgacagatgtcttgtgctgccggtactacacaaactgcttgcactgatgacaatgcgttagcttactacaacacaacaaagggaggtaggtttgtacttgcactgttatccgatttacaggatttgaaatgggctagattccctaagagtgatggaactggtactatctatacagaactggaaccaccttgtaggtttgttacagacacacctaaaggtcctaaagtgaagtatttatactttattaaaggattaaacaacctaaatagaggtatggtacttggtagtttagctgccacagtacgtctacaagctggtaatgcaacagaagtgcctgccaattcaactgtattatctttctgtgcttttgctgtagatgctgctaaagcttacaaagattatctagctagtgggggacaaccaatcactaattgtgttaagatgttgtgtacacacactggtactggtcaggcaataacagttacaccggaagccaatatggatcaagaatcctttggtggtgcatcgtgttgtctgtactgccgttgccacatagatcatccaaatcctaaaggattttgtgacttaaaaggtaagtatgtacaaatacctacaacttgtgctaatgaccctgtgggttttacacttaaaaacacagtctgtaccgtctgcggtatgtggaaaggttatggctgtagttgtgatcaactccgcgaacccatgcttcagtcagctgatgcacaatcgtttttaaacgggtttgcggtgtaagtgcagcccgtcttacaccgtgcggcacaggcactagtactgatgtcgtatacagggcttttgacatctacaatgataaagtagctggttttgctaaattcctaaaaactaattgttgtcgcttccaagaaaaggacgaagatgacaatttaattgattcttactttgtagttaagagacacactttctctaactaccaacatgaagaaacaatttataatttacttaaggattgtccagctgttgctaaacatgacttctttaagtttagaatagacggtgacatggtaccacatatatcacgtcaacgtcttactaaatacacaatggcagacctcgtctatgctttaaggcattttgatgaaggtaattgtgacacattaaaagaaatacttgtcacatacaattgttgtgatgatgattatttcaataaaaaggactggtatgattttgtagaaaacccagatatattacgcgtatacgccaacttaggtgaacgtgtacgccaagctttgttaaaaacagtacaattctgtgatgccatgcgaaatgctggtattgttggtgtactgacattagataatcaagatctcaatggtaactggtatgatttcggtgatttcatacaaaccacgccaggtagtggagttcctgttgtagattcttattattcattgttaatgcctatattaaccttgaccagggctttaactgcagagtcacatgttgacactgacttaacaaagccttacattaagtgggatttgttaaaatatgacttcacggaagagaggttaaaactctttgaccgttattttaaatattgggatcagacataccacccaaattgtgttaactgtttggatgacagatgcattctgcattgtgcaaactttaatgttttattctctacagtgttcccacctacaagttttggaccactagtgagaaaaatatttgttgatggtgttccatttgtagtttcaactggataccacttcagagagctaggtgttgtacataatcaggatgtaaacttacatagctctagacttagttttaaggaattacttgtgtatgctgctgaccctgctatgcacgctgcttctggtaatctattactagataaacgcactacgtgcttttcagtagctgcacttactaacaatgttgcttttcaaactgtcaaacccggtaattttaacaaagacttctatgactttgctgtgtctaagggtttctttaaggaaggaagttctgttgaattaaaacacttcttctttgctcaggatggtaatgctgctatcagcgattatgactactatcgttataatctaccaacaatgtgtgatatcagacaactactatttgtagttgaagttgttgataagtactttgattgttacgatggtggctgtattaatgctaaccaagtcatcgtcaacaacctagacaaatcagctggttttccatttaataaatggggtaaggctagactttattatgattcaatgagttatgaggatcaagatgcacttttcgcatatacaaaacgtaatgtcatccctactataactcaaatgaatcttaagtatgccattagtgcaaagaatagagctcgcaccgtagctggtgtctctatctgtagtactatgaccaatagacagtttcatcaaaaattattgaaatcaatagccgccactagaggagctactgtagtaattggaacaagcaaattctatggtggttggcacaacatgttaaaaactgtttatagtgatgtagaaaaccctcaccttatgggttgggattatcctaaatgtgatagagccatgcctaacatgcttagaattatggcctcacttgttcttgctcgcaaacatacaacgtgttgtagcttgtcacaccgtttctatagattagctaatgagtgtgctcaagtattgagtgaaatggtcatgtgtggcggttcactatatgttaaaccaggtggaacctcatcaggagatgccacaactgcttatgctaatagtgtttttaacatttgtcaagctgtcacggccaatgttaatgcacttttatctactgatggtaacaaaattgccgataagtatgtccgcaatttacaacacagactttatgagtgtctctatagaaatagagatgttgacacagactttgtgaatgagttttacgcatatttgcgtaaacatttctcaatgatgatactctctgacgatgctgttgtgtgtttcaatagcacttatgcatctcaaggtctagtggctagcataaagaactttaagtcagttctttattatcaaaacaatgtttttatgtctgaagcaaaatgttggactgagactgaccttactaaaggacctcatgaattttgctctcaacatacaatgctagttaaacagggtgatgattatgtgtaccttccttacccagatccatcaagaatcctaggggccggctgttttgtagatgatatcgtaaaaacagatggtacacttatgattgaacggttcgtgtctttagctatagatgcttacccacttactaaacatcctaatcaggagtatgctgatgtctttcatttgtacttacaatacataagaaagctacatgatgagttaacaggacacatgttagacatgtattctgttatgcttactaatgataacacttcaaggtattgggaacctgagttttatgaggctatgtacacaccgcatacagtcttacaggctgttggggcttgtgttctttgcaattcacagacttcattaagatgtggtgcttgcatacgtagaccattcttatgttgtaaatgctgttacgaccatgtcatatcaacatcacataaattagtcttgtctgttaatccgtatgtttgcaatgctccaggttgtgatgtcacagatgtgactcaactttacttaggaggtatgagctattattgtaaatcacataaaccacccattagttttccattgtgtgctaatggacaagtttttggtttatataaaaatacatgtgttggtagcgataatgttactgactttaatgcaattgcaacatgtgactggacaaatgctggtgattacattttagctaacacctgtactgaaagactcaagctttttgcagcagaaacgctcaaagctactgaggagacatttaaactgtcttatggtattgctactgtacgtgaagtgctgtctgacagagaattacatctttcatgggaagttggtaaacctagaccaccacttaaccgaaattatgtctttactggttatcgtgtaactaaaaacagtaaagtacaaataggagagtacacctttgaaaaaggtgactatggtgatgctgttgtttaccgaggtacaacaacttacaaattaaatgttggtgattattttgtgctgacatcacatacagtaatgccattaagtgcacctacactagtgccacaagagcactatgttagaattactggcttatacccaacactcaatatctcagatgagttttctagcaatgttgcaaattatcaaaaggttggtatgcaaaagtattctacactccagggaccacctggtactggtaagagtcattttgctattggcctagctctctactacccttctgctcgcatagtgtatacagcttgctctcatgccgctgttgatgcactatgtgagaaggcattaaaatatttgcctatagataaatgtagtagaattatacctgcacgtgctcgtgtagagtgttttgataaattcaaagtgaattcaacattagaacagtatgtcttttgtactgtaaatgcattgcctgagacgacagcagatatagttgtctttgatgaaatttcaatggccacaaattatgatttgagtgttgtcaatgccagattacgtgctaagcactatgtgtacattggcgaccctgctcaattacctgcaccacgcacattgctaactaagggcacactagaaccagaatatttcaattcagtgtgtagacttatgaaaactataggtccagacatgttcctcggaacttgtcggcgttgtcctgctgaaattgttgacactgtgagtgctttggtttatgataataagcttaaagcacataaagacaaatcagctcaatgctttaaaatgttttataagggtgttatcacgcatgatgtttcatctgcaattaacaggccacaaataggcgtggtaagagaattccttacacgtaaccctgcttggagaaaagctgtctttatttcaccttataattcacagaatgctgtagcctcaaagattttgggactaccaactcaaactgttgattcatcacagggctcagaatatgactatgtcatattcactcaaaccactgaaacagctcactcttgtaatgtaaacagatttaatgttgctattaccagagcaaaagtaggcatactttgcataatgtctgatagagacctttatgacaagttgcaatttacaagtcttgaaattccacgtaggaatgtggcaactttacaagctgaaaatgtaacaggactctttaaagattgtagtaaggtaatcactgggttacatcctacacaggcacctacacacctcagtgttgacactaaattcaaaactgaaggtttatgtgttgacatacctggcatacctaaggacatgacctatagaagactcatctctatgatgggttttaaaatgaattatcaagttaatggttaccctaacatgtttatcacccgcgaagaagctataagacatgtacgtgcatggattggcttcgatgtcgaggggtgtcatgctactagagaagctgttggtaccaatttacctttacagctaggtttttctacaggtgttaacctagttgctgtacctacaggttatgttgatacacctaataatacagatttttccagagttagtgctaaaccaccgcctggagatcaatttaaacacctcataccacttatgtacaaaggacttccttggaatgtagtgcgtataaagattgtacaaatgttaagtgacacacttaaaaatctctctgacagagtcgtatttgtcttatgggcacatggctttgagttgacatctatgaagtattttgtgaaaataggacctgagcgcacctgttgtctatgtgatagacgtgccacatgcttttccactgcttcagacacttatgcctgttggcatcattctattggatttgattacgtctataatccgtttatgattgatgttcaacaatggggttttacaggtaacctacaaagcaaccatgatctgtattgtcaagtccatggtaatgcacatgtagctagttgtgatgcaatcatgactaggtgtctagctgtccacgagtgctttgttaagcgtgttgactggactattgaatatcctataattggtgatgaactgaagattaatgcggcttgtagaaaggttcaacacatggttgttaaagctgcattattagcagacaaattcccagttcttcacgacattggtaaccctaaagctattaagtgtgtacctcaagctgatgtagaatggaagttctatgatgcacagccttgtagtgacaaagcttataaaatagaagaattattctattcttatgccacacattctgacaaattcacagatggtgtatgcctattttggaattgcaatgtcgatagatatcctgctaattccattgtttgtagatttgacactagagtgctatctaaccttaacttgcctggttgtgatggtggcagtttgtatgtaaataaacatgcattccacacaccagcttttgataaaagtgcttttgttaatttaaaacaattaccatttttctattactctgacagtccatgtgagtctcatggaaaacaagtagtgtcagatatagattatgtaccactaaagtctgctacgtgtataacacgttgcaatttaggtggtgctgtctgtagacatcatgctaatgagtacagattgtatctcgatgcttataacatgatgatctcagctggctttagcttgtgggtttacaaacaatttgatacttataacctctggaacacttttacaagacttcagagtttagaaaatgtggcttttaatgttgtaaataagggacactttgatggacaacagggtgaagtaccagtttctatcattaataacactgtttacacaaaagttgatggtgttgatgtagaattgtttgaaaataaaacaacattacctgttaatgtagcatttgagctttgggctaagcgcaacattaaaccagtaccagaggtgaaaatactcaataatttgggtgtggacattgctgctaatactgtgatctgggactacaaaagagatgctccagcacatatatctactattggtgtttgttctatgactgacatagccaagaaaccaactgaaacgatttgtgcaccactcactgtcttttttgatggtagagttgatggtcaagtagacttatttagaaatgcccgtaatggtgttcttattacagaaggtagtgttaaaggtttacaaccatctgtaggtcccaaacaagctagtcttaatggagtcacattaattggagaagccgtaaaaacacagttcaattattataagaaagttgatggtgttgtccaacaattacctgaaacttactttactcagagtagaaatttacaagaatttaaacccaggagtcaaatggaaattgatttcttagaattagctatggatgaattcattgaacggtataaattagaaggctatgccttcgaacatatcgtttatggagattttagtcatagtcagttaggtggtttacatctactgattggactagctaaacgttttaaggaatcaccttttgaattagaagattttattcctatggacagtacagttaaaaactatttcataacagatgcgcaaacaggttcatctaagtgtgtgtgttctgttattgatttattacttgatgattttgttgaaataataaaatcccaagatttatctgtagtttctaaggttgtcaaagtgactattgactatacagaaatttcatttatgctttggtgtaaagatggccatgtagaaacattttacccaaaattacaatctagtcaagcgtggcaaccgggtgttgctatgcctaatctttacaaaatgcaaagaatgctattagaaaagtgtgaccttcaaaattatggtgatagtgcaacattacctaaaggcataatgatgaatgtcgcaaaatatactcaactgtgtcaatatttaaacacattaacattagctgtaccctataatatgagagttatacattttggtgctggttctgataaaggagttgcaccaggtacagctgttttaagacagtggttgcctacgggtacgctgcttgtcgattcagatcttaatgactttgtctctgatgcagattcaactttgattggtgattgtgcaactgtacatacagctaataaatgggatctcattattagtgatatgtacgaccctaagactaaaaatgttacaaaagaaaatgactctaaagagggttttttcacttacatttgtgggtttatacaacaaaagctagctcttggaggttccgtggctataaagataacagaacattcttggaatgctgatctttataagctcatgggacacttcgcatggtggacagcctttgttactaatgtgaatgcgtcatcatctgaagcatttttaattggatgtaattatcttggcaaaccacgcgaacaaatagatggttatgtcatgcatgcaaattacatattttggaggaatacaaatccaattcagttgtcttcctattctttatttgacatgagtaaatttccccttaaattaaggggtactgctgttatgtctttaaaagaaggtcaaatcaatgatatgattttatctcttcttagtaaaggtagacttataattagagaaaacaacagagttgttatttctagtgatgttcttgttaacaactaaacgaacaatgtttgtttttcttgttttattgccactagtctctagtcagtgtgttaatcttacaaccagaactcaattaccccctgcatacactaattctttcacacgtggtgtttattaccctgacaaagttttcagatcctcagttttacattcaactcaggacttgttcttacctttcttttccaatgttacttggttccatgctatacatgtctctgggaccaatggtactaagaggtttgataaccctgtcctaccatttaatgatggtgtttattttgcttccactgagaagtctaacataataagaggctggatttttggtactactttagattcgaagacccagtccctacttattgttaataacgctactaatgttgttattaaagtctgtgaatttcaattttgtaatgatccatttttgggtgtttattaccacaaaaacaacaaaagttggatggaaagtgagttcagagtttattctagtgcgaataattgcacttttgaatatgtctctcagccttttcttatggaccttgaaggaaaacagggtaatttcaaaaatcttagggaatttgtgtttaagaatattgatggttattttaaaatatattctaagcacacgcctattaatttagtgcgtgatctcccccagggtttttcggctttagaaccattggtagatttgccaataggtattaacatcactaggtttcaaactttacttgctttacatagaagttatttgactcctggtgattcttcttcaggttggacagctggtgctgcagcttattatgtgggttatcttcaacctaggacttttctattaaaatataatgaaaatggaaccattacagatgctgtagactgtgcacttgaccctctctcagaaacaaagtgtacgttgaaatccttcactgtagaaaaaggaatctatcaaacttctaactttagagtccaaccaacagaatctattgttagatttcctaatattacaaacttgtgcccttttggtgaagtttttaacgccaccagatttgcatctgtttatgcttggaacaggaagagaatcagcaactgtgttgctgattattctgtcctatataattccgcatcattttccacttttaagtgttatggagtgtctcctactaaattaaatgatctctgctttactaatgtctatgcagattcatttgtaattagaggtgatgaagtcagacaaatcgctccagggcaaactggaaagattgctgattataattataaattaccagatgattttacaggctgcgttatagcttggaattctaacaatcttgattctaaggttggtggtaattataattacctgtatagattgtttaggaagtctaatctcaaaccttttgagagagatatttcaactgaaatctatcaggccggtagcacaccttgtaatggtgttgaaggttttaattgttactttcctttacaatcatatggtttccaacccactaatggtgttggttaccaaccatacagagtagtagtactttcttttgaacttctacatgcaccagcaactgtttgtggacctaaaaagtctactaatttggttaaaaacaaatgtgtcaatttcaacttcaatggtttaacaggcacaggtgttcttactgagtctaacaaaaagtttctgcctttccaacaatttggcagagacattgctgacactactgatgctgtccgtgatccacagacacttgagattcttgacattacaccatgttcttttggtggtgtcagtgttataacaccaggaacaaatacttctaaccaggttgctgttctttatcaggatgttaactgcacagaagtccctgttgctattcatgcagatcaacttactcctacttggcgtgtttattctacaggttctaatgtttttcaaacacgtgcaggctgtttaataggggctgaacatgtcaacaactcatatgagtgtgacatacccattggtgcaggtatatgcgctagttatcagactcagactaattctcctcggcgggcacgtagtgtagctagtcaatccatcattgcctacactatgtcacttggtgcagaaaattcagttgcttactctaataactctattgccatacccacaaattttactattagtgttaccacagaaattctaccagtgtctatgaccaagacatcagtagattgtacaatgtacatttgtggtgattcaactgaatgcagcaatcttttgttgcaatatggcagtttttgtacacaattaaaccgtgctttaactggaatagctgttgaacaagacaaaaacacccaagaagtttttgcacaagtcaaacaaatttacaaaacaccaccaattaaagattttggtggttttaatttttcacaaatattaccagatccatcaaaaccaagcaagaggtcatttattgaagatctacttttcaacaaagtgacacttgcagatgctggcttcatcaaacaatatggtgattgccttggtgatattgctgctagagacctcatttgtgcacaaaagtttaacggccttactgttttgccacctttgctcacagatgaaatgattgctcaatacacttctgcactgttagcgggtacaatcacttctggttggacctttggtgcaggtgctgcattacaaataccatttgctatgcaaatggcttataggtttaatggtattggagttacacagaatgttctctatgagaaccaaaaattgattgccaaccaatttaatagtgctattggcaaaattcaagactcactttcttccacagcaagtgcacttggaaaacttcaagatgtggtcaaccaaaatgcacaagctttaaacacgcttgttaaacaacttagctccaattttggtgcaatttcaagtgttttaaatgatatcctttcacgtcttgacaaagttgaggctgaagtgcaaattgataggttgatcacaggcagacttcaaagtttgcagacatatgtgactcaacaattaattagagctgcagaaatcagagcttctgctaatcttgctgctactaaaatgtcagagtgtgtacttggacaatcaaaaagagttgatttttgtggaaagggctatcatcttatgtccttccctcagtcagcacctcatggtgtagtcttcttgcatgtgacttatgtccctgcacaagaaaagaacttcacaactgctcctgccatttgtcatgatggaaaagcacactttcctcgtgaaggtgtctttgtttcaaatggcacacactggtttgtaacacaaaggaatttttatgaaccacaaatcattactacagacaacacatttgtgtctggtaactgtgatgttgtaataggaattgtcaacaacacagtttatgatcctttgcaacctgaattagactcattcaaggaggagttagataaatattttaagaatcatacatcaccagatgttgatttaggtgacatctctggcattaatgcttcagttgtaaacattcaaaaagaaattgaccgcctcaatgaggttgccaagaatttaaatgaatctctcatcgatctccaagaacttggaaagtatgagcagtatataaaatggccatggtacatttggctaggttttatagctggcttgattgccatagtaatggtgacaattatgctttgctgtatgaccagttgctgtagttgtctcaagggctgttgttcttgtggatcctgctgcaaatttgatgaagacgactctgagccagtgctcaaaggagtcaaattacattacacataaacgaacttatggatttgtttatgagaatcttcacaattggaactgtaactttgaagcaaggtgaaatcaaggatgctactccttcagattttgttcgcgctactgcaacgataccgatacaagcctcactccctttcggatggcttattgttggcgttgcacttcttgctgtttttcagagcgcttccaaaatcataaccctcaaaaagagatggcaactagcactctccaagggtgttcactttgtttgcaacttgctgttgttgtttgtaacagtttactcacaccttttgctcgttgctgctggccttgaagccccttttctctatctttatgctttagtctacttcttgcagagtataaactttgtaagaataataatgaggctttggctttgctggaaatgccgttccaaaaacccattactttatgatgccaactattttctttgctggcatactaattgttacgactattgtataccttacaatagtgtaacttcttcaattgtcattacttcaggtgatggcacaacaagtcctatttctgaacatgactaccagattggtggttatactgaaaaatgggaatctggagtaaaagactgtgttgtattacacagttacttcacttcagactattaccagctgtactcaactcaattgagtacagacactggtgttgaacatgttaccttcttcatctacaataaaattgttgatgagcctgaagaacatgtccaaattcacacaatcgacggttcatccggagttgttaatccagtaatggaaccaatttatgatgaaccgacgacgactactagcgtgcctttgtaagcacaagctgatgagtacgaacttatgtactcattcgtttcggaagagacaggtacgttaatagttaatagcgtacttctttttcttgctttcgtggtattcttgctagttacactagccatccttactgcgcttcgattgtgtgcgtactgctgcaatattgttaacgtgagtcttgtaaaaccttctttttacgtttactctcgtgttaaaaatctgaattcttctagagttcctgatcttctggtctaaacgaactaaatattatattagtttttctgtttggaactttaattttagccatggcagattccaacggtactattaccgttgaagagcttaaaaagctccttgaacaatggaacctagtaataggtttcctattccttacatggatttgtcttctacaatttgcctatgccaacaggaataggtttttgtatataattaagttaattttcctctggctgttatggccagtaactttagcttgttttgtgcttgctgctgtttacagaataaattggatcaccggtggaattgctatcgcaatggcttgtcttgtaggcttgatgtggctcagctacttcattgcttctttcagactgtttgcgcgtacgcgatccatgtggtcattcaatccagaaactaacattcttctcaacgtgccactccatggcactattctgaccagaccgcttctagaaagtgaactcgtaatcggagctgtgatccttcgtggacatcttcgtattgctggacaccatctaggacgctgtgacatcaaggacctgcctaaagaaatcactgttgctacatcacgaacgctttcttattacaaattgggagcttcgcagcgtgtagcaggtgactcaggttttgctgcatacagtcgctacaggattggcaactataaattaaacacagaccattccagtagcagtgacaatattgctttgcttgtacagtaagtgacaacagatgtttcatctcgttgactttcaggttactatagcagagatattactaattattatgaggacttttaaagtttccatttggaatcttgattacatcataaacctcataattaaaaatttatctaagtcactaactgagaataaatattctcaattagatgaagagcaaccaatggagattgattaaacgaacatgaaaattattcttttcttggcactgataacactcgctacttgtgagctttatcactaccaagagtgtgttagaggtacaacagtacttttaaaagaaccttgctcttctggaacatacgagggcaattcaccatttcatcctctagctgataacaaatttgcactgacttgctttagcactcaatttgcttttgcttgtcctgacggcgtaaaacacgtctatcagttacgtgccagatcagtttcacctaaactgttcatcagacaagaggaagttcaagaactttactctccaatttttcttattgttgcggcaatagtgtttataacactttgcttcacactcaaaagaaagacagaatgattgaactttcattaattgacttctatttgtgctttttagcctttctgctattccttgttttaattatgcttattatcttttggttctcacttgaactgcaagatcataatgaaacttgtcacgcctaaacgaacatgaaatttcttgttttcttaggaatcatcacaactgtagctgcatttcaccaagaatgtagtttacagtcatgtactcaacatcaaccatatgtagttgatgacccgtgtcctattcacttctattctaaatggtatattagagtaggagctagaaaatcagcacctttaattgaattgtgcgtggatgaggctggttctaaatcacccattcagtacatcgatatcggtaattatacagtttcctgtttaccttttacaattaattgccaggaacctaaattgggtagtcttgtagtgcgttgttcgttctatgaagactttttagagtatcatgacgttcgtgttgttttagatttcatctaaacgaacaaactaaaatgtctgataatggaccccaaaatcagcgaaatgcaccccgcattacgtttggtggaccctcagattcaactggcagtaaccagaatggagaacgcagtggggcgcgatcaaaacaacgtcggccccaaggtttacccaataatactgcgtcttggttcaccgctctcactcaacatggcaaggaagaccttaaattccctcgaggacaaggcgttccaattaacaccaatagcagtccagatgaccaaattggctactaccgaagagctaccagacgaattcgtggtggtgacggtaaaatgaaagatctcagtccaagatggtatttctactacctaggaactgggccagaagctggacttccctatggtgctaacaaagacggcatcatatgggttgcaactgagggagccttgaatacaccaaaagatcacattggcacccgcaatcctgctaacaatgctgcaatcgtgctacaacttcctcaaggaacaacattgccaaaaggcttctacgcagaagggagcagaggcggcagtcaagcctcttctcgttcctcatcacgtagtcgcaacagttcaagaaattcaactccaggcagcagtaggggaacttctcctgctagaatggctggcaatggcggtgatgctgctcttgctttgctgctgcttgacagattgaaccagcttgagagcaaaatgtctggtaaaggccaacaacaacaaggccaaactgtcactaagaaatctgctgctgaggcttctaagaagcctcggcaaaaacgtactgccactaaagcatacaatgtaacacaagctttcggcagacgtggtccagaacaaacccaaggaaattttggggaccaggaactaatcagacaaggaactgattacaaacattggccgcaaattgcacaatttgcccccagcgcttcagcgttcttcggaatgtcgcgcattggcatggaagtcacaccttcgggaacgtggttgacctacacaggtgccatcaaattggatgacaaagatccaaatttcaaagatcaagtcattttgctgaataagcatattgacgcatacaaaacattcccaccaacagagcctaaaaaggacaaaaagaagaaggctgatgaaactcaagccttaccgcagagacagaagaaacagcaaactgtgactcttcttcctgctgcagatttggatgatttctccaaacaattgcaacaatccatgagcagtgctgactcaactcaggcctaaactcatgcagaccacacaaggcagatgggctatataaacgttttcgcttttccgtttacgatatatagtctactcttgtgcagaatgaattctcgtaactacatagcacaagtagatgtagttaactttaatctcacatagcaatctttaatcagtgtgtaacattagggaggacttgaaagagccaccacattttcaccgaggccacgcggagtacgatcgagtgtacagtgaacaatgctagggagagctgcctatatggaagagccctaatgtgtaaaattaattttagtagtgctatccccatgtgattttaatagcttcttaggagaatgacaaaaaaaaaaaaaaaaaaaaaaaaaaaaaaaaaaaaaaaaaaaaaaaaaaaaaaaaaaagggtcggcatggcatctccacctcctcgcggtccgacctgggcatccgaaggaggacgcacgtccactcggatggctaagggagcagcacactggcggccgttactagggccgcgcccttcccaacagttgcgcagcctgaatggcgaatggagatccaatttttaagtgtataatgtgttaaactactgattctaattgtttgtgtattttagattcacagtcccaaggctcatttcaggcccctcagtcctcacagtctgttcatgatcataatcagccataccacatttgtagaggttttacttgctttaaaaaacctcccacacctccccctgaacctgaaacataaaatgaatgcaattgttgttgttaacttgtttattgcagcttataatggttacaaataaagcaatagcatcacaaatttcacaaataaagcatttttttcactgcattctagttgtggtttgtccaaactcatcaatgtatcttaaagcttgagtattctatagtctcacctaaatagcttggcgtaatcatggtcatagctgtttcctgtgtgaaattgttatccgctcacaattccacacaacatacgagccggaagcataaagtgtaaagcctggggtgcctaatgagtgagctaactcacattaattgcgttgcgctcactgcccgctttccagtcgggaaacctgtcgtgccagctgcattaatgaatcggccaacgcgaaccccttgcggccgcccgggccgtcgaccaattctcatgtttgacagcttatcatcgaatttctgccattcatccgcttattatcacttattcaggcgtagcaaccaggcgtttaagggcaccaataactgccttaaaaaaattacgccccgccctgccactcatcgcagtactgttgtaattcattaagcattctgccgacatggaagccatcacaaacggcatgatgaacctgaatcgccagcggcatcagcaccttgtcgccttgcgtataatatttgcccatggtgaaaacgggggcgaagaagttgtccatattggccacgtttaaatcaaaactggtgaaactcacccagggattggctgagacgaaaaacatattctcaataaaccctttagggaaataggccaggttttcaccgtaacacgccacatcttgcgaatatatgtgtagaaactgccggaaatcgtcgtggtattcactccagagcgatgaaaacgtttcagtttgctcatggaaaacggtgtaacaagggtgaacactatcccatatcaccagctcaccgtctttcattgccatacgaaattccggatgagcattcatcaggcgggcaagaatgtgaataaaggccggataaaacttgtgcttatttttctttacggtctttaaaaaggccgtaatatccagctgaacggtctggttataggtacattgagcaactgactgaaatgcctcaaaatgttctttacgatgccattgggatatatcaacggtggtatatccagtgatttttttctccattttagcttccttagctcctgaaaatctcgataactcaaaaaatacgcccggtagtgatcttatttcattatggtgaaagttggaacctcttacgtgccgatcaacgtctcattttcgccaaaagttggcccagggcttcccggtatcaacagggacaccaggatttatttattctgcgaagtgatcttccgtcacaggtatttattcgcgataagctcatggagcggcgtaaccgtcgcacaggaaggacagagaaagcgcggatctgggaagtgacggacagaacggtcaggacctggattggggaggcggttgccgccgctgctgctgacggtgtgacgttctctgttccggtcacaccacatacgttccgccattcctatgcgatgcacatgctgtatgccggtataccgctgaaagttctgcaaagcctgatgggacataagtccatcagttcaacggaagtctacacgaaggtttttgcgctggatgtggctgcccggcaccgggtgcagtttgcgatgccggagtctgatgcggttgcgatgctgaaacaattatcctgagaataaatgccttggcctttatatggaaatgtggaactgagtggatatgctgtttttgtctgttaaacagagaagctggctgttatccactgagaagcgaacgaaacagtcgggaaaatctcccattatcgtagagatccgcattattaatctcaggagcctgtgtagcgtttataggaagtagtgttctgtcatgatgcctgcaagcggtaacgaaaacgatttgaatatgccttcaggaacaatagaaatcttcgtgcggtgttacgttgaagtggagcggattatgtcagcaatggacagaacaacctaatgaacacagaaccatgatgtggtctgtccttttacagccagtagtgctcgccgcagtcgagcgacagggcgaagccctcggctggttgccctcgccgctgggctggcggccgtctatggccctgcaaacgcgccagaaacgccgtcgaagccgtgtgcgagacaccgcggccggccgccggcgttgtggatacctcgcggaaaacttggccctcactgacagatgaggggcggacgttgacacttgaggggccgactcacccggcgcggcgttgacagatgaggggcaggctcgatttcggccggcgacgtggagctggccagcctcgcaaatcggcgaaaacgcctgattttacgcgagtttcccacagatgatgtggacaagcctggggataagtgccctgcggtattgacacttgaggggcgcgactactgacagatgaggggcgcgatccttgacacttgaggggcagagtgctgacagatgaggggcgcacctattgacatttgaggggctgtccacaggcagaaaatccagcatttgcaagggtttccgcccgtttttcggccaccgctaacctgtcttttaacctgcttttaaaccaatatttataaaccttgtttttaaccagggctgcgccctgtgcgcgtgaccgcgcacgccgaaggggggtgcccccccttctcgaaccctcccggtcgagtgagcgaggaagcaccagggaacagcacttatatattctgcttacacacgatgcctgaaaaaacttcccttggggttatccacttatccacggggatatttttataattattttttttatagtttttagatcttcttttttagagcgccttgtaggcctttatccatgctggttctagagaaggtgttgtgacaaattgccctttcagtgtgacaaatcaccctcaaatgacagtcctgtctgtgacaaattgcccttaaccctgtgacaaattgccctcagaagaagctgttttttcacaaagttatccctgcttattgactcttttttatttagtgtgacaatctaaaaacttgtcacacttcacatggatctgtcatggcggaaacagcggttatcaatcacaagaaacgtaaaaatagcccgcgaatcgtccagtcaaacgacctcactgaggcggcatatagtctctcccgggatcaaaaacgtatgctgtatctgttcgttgaccagatcagaaaatctgatggcaccctacaggaacatgacggtatctgcgagatccatgttgctaaatatgctgaaatattcggattgacctctgcggaagccagtaaggatatacggcaggcattgaagagtttcgcggggaaggaagtggttttttatcgccctgaagaggatgccggcgatgaaaaaggctatgaatcttttccttggtttatcaaacgtgcgcacagtccatccagagggctttacagtgtacatatcaacccatatctcattcccttctttatcgggttacagaaccggtttacgcagtttcggcttagtgaaacaaaagaaatcaccaatccgtatgccatgcgtttatacgaatccctgtgtcagtatcgtaagccggatggctcaggcatcgtctctctgaaaatcgactggatcatagagcgttaccagctgcctcaaagttaccagcgtatgcctgacttccgccgccgcttcctgcaggtctgtgttaatgagatcaacagcagaactccaatgcgcctctcatacattgagaaaaagaaaggccgccagacgactcatatcgtattttccttccgcgatatcacttccatgacgacaggatagtctgagggttatctgtcacagatttgagggtggttcgtcacatttgttctgacctactgagggtaatttgtcacagttttgctgtttccttcagcctgcatggattttctcatactttttgaactgtaatttttaaggaagccaaatttgagggcagtttgtcacagttgatttccttctctttcccttcgtcatgtgacctgatatcgggggttagttcgtcatcattgatgagggttgattatcacagtttattactctgaattggctatccgcgtgtgtacctctacctggagtttttcccacggtggatatttcttcttgcgctgagcgtaagagctatctgacagaacagttcttctttgcttcctcgccagttcgctcgctatgctcggttacacggctgcggcg

SEQ ID NO: 14 - DNA, 35283 bp, Artificial Sequence
  Clone pCCI-4K-SARS-CoV-2-DWWDW. Based on SARS-CoV-2.
gatgtgctgcaaggcgattaagttgggtaacgccagggttttcccagtcacgacgttgtaaaacgacggccagtgaattgtaatacgactcactatagggcgaattctagttattaatagtaatcaattacggggtcattagttcatagcccatatatggagttccgcgttacataacttacggtaaatggcccgcctggctgaccgcccaacgacccccgcccattgacgtcaataatgacgtatgttcccatagtaacgccaatagggactttccattgacgtcaatgggtggagtatttacggtaaactgcccacttggcagtacatcaagtgtatcatatgccaagtacgccccctattgacgtcaatgacggtaaatggcccgcctggcattatgcccagtacatgaccttatgggactttcctacttggcagtacatctacgtattagtcatcgctattaccatggtgatgcggttttggcagtacatcaatgggcgtggatagcggtttgactcacggggatttccaagtctccaccccattgacgtcaatgggagtttgttttggcaccaaaatcaacgggactttccaaaatgtcgtaacaactccgccccattgacgcaaatgggcggtaggcgtgtacggtgggaggtctatataagcagagctggtttagtgaaccgtattaaaggtttataccttcccaggtaacaaaccaaccaactttcgatctcttgtagatctgttctctaaacgaactttaaaatctgtgtggctgtcactcggctgcatgcttagtgcactcacgcagtataattaataactaattactgtcgttgacaggacacgagtaactcgtctatcttctgcaggctgcttacggtttcgtccgtgttgcagccgatcatcagcacatctaggtttcgtccgggtgtgaccgaaaggtaagatggagagccttgtccctggtttcaacgagaaaacacacgtccaactcagtttgcctgttttacaggttcgcgacgtgctcgtacgtggctttggagactccgtggaggaggtcttatcagaggcacgtcaacatcttaaagatggcacttgtggcttagtagaagttgaaaaaggcgttttgcctcaacttgaacagccctatgtgttcatcaaacgttcggatgctcgaactgcacctcatggtcatgttatggttgagctggtagcagaactcgaaggcattcagtacggtcgtagtggtgagacacttggtgtccttgtccctcatgtgggcgaaataccagtggcttaccgcaaggttcttcttcgtaagaacggtaataaaggagctggtggccatagttacggcgccgatctaaagtcatttgacttaggcgacgagcttggcactgatccttatgaagattttcaagaaaactggaacactaaacatagcagtggtgttacccgtgaactcatgcgtgagcttaacggaggggcatacactcgctatgtcgataacaacttctgtggccctgatggctaccctcttgagtgcattaaagaccttctagcacgtgctggtaaagcttcatgcactttgtccgaacaactggactttattgacactaagaggggtgtatactgctgccgtgaacatgagcatgaaattgcttggtacacggaacgttctgaaaagagctatgaattgcagacaccttttgaaattaaattggcaaagaaatttgacaccttcaatggggaatgtccaaattttgtatttcccttaaattccataatcaagactattcaaccaagggttgaaaagaaaaagcttgatggctttatgggtagaattcgatctgtctatccagttgcgtcaccaaatgaatgcaaccaaatgtgcctttcaactctcatgaagtgtgatcattgtggtgaaacttcatggcagacgggcgattttgttaaagccacttgcgaattttgtggcactgagaatttgactaaagaaggtgccactacttgtggttacttaccccaaaatgctgttgttaaaatttattgtccagcatgtcacaattcagaagtaggacctgagcatagtcttgccgaataccataatgaatctggcttgaaaaccattcttcgtaagggtggtcgcactattgcctttggaggctgtgtgttctcttatgttggttgccataacaagtgtgcctattgggtcccgcgtgcgagtgcgaacataggttgtaatcatacgggtgtagtaggtgaaggttcggaaggtctaaatgataatctactagaaatactacaaaaagaaaaagtaaatataaatatagtaggtgattttaaactaaatgaagaaatagcgataatattagcgtcgttttcggcgtcgacgagtgcgtttgtagaaacggtaaaaggtttagattataaagcgtttaaacaaatagtagaatcgtgtggtaattttaaagtgacgaaaggtaaagcgaaaaaaggtgcgtggaatataggtgaacaaaaatcgatactaagtccgctatatgcgtttgcgtcggaagcggcgcgtgtagtacgttcgatattttcgcgtacgctagaaacggcgcaaaattcggtacgtgtattacaaaaagcggcgataacgatactagatggtatatcgcaatattcgctacgtctaatagatgcgatgatgtttacgtcggatttagcgacgaataatctagtagtaatggcgtatataacgggtggtgtagtacaattaacgtcgcaatggctaacgaatatatttggtacggtatatgaaaaactaaaaccggtactagattggctagaagaaaaatttaaagaaggtgtagaatttctacgtgatggttgggaaatagtaaaatttatatcgacgtgtgcgtgtgaaatagtaggtggtcaaatagtaacgtgtgcgaaagaaataaaagaatcggtacaaacgttttttaaactagtaaataaatttctagcgctatgtgcggattcgataataataggtggtgcgaaactaaaagcgctaaatctaggtgaaacgtttgtgacgcattcgaaaggtttatatcgtaaatgtgtaaaatcgcgtgaagaaacgggtctactaatgccgctaaaagcgccgaaagaaataatatttttagaaggtgaaacgctaccgacggaagtattaacggaagaagtagtattaaaaacgggtgatttacaaccgttagaacaaccgacgtcggaagcggtagaagcgccgttagtaggtacgccggtatgtataaatggtctaatgttactagaaataaaagatacggaaaaatattgtgcgctagcgccgaatatgatggtaacgaataatacgtttacgctaaaaggtggtgcgccgacgaaagtaacgtttggtgatgatacggtaatagaagtacaaggttataaatcggtaaatataacgtttgaactagatgaacgtatagataaagtactaaatgaaaaatgttcggcgtatacggtagaactaggtacggaagtaaatgaatttgcgtgtgtagtagcggatgcggtaataaaaacgttacaaccggtatcggaattactaacgccgctaggtatagatttagatgaatggtcgatggcgacgtattatttatttgatgaatcgggtgaatttaaattagcgtcgcatatgtattgttcgttttatccgccggatgaagatgaagaagaaggtgattgtgaagaagaagaatttgaaccgtcgacgcaatatgaatatggtacggaagatgattatcaaggtaaaccgttagaatttggtgcgacgtcggcggcgctacaaccggaagaagaacaagaagaagattggttggatgatgattcgcaacaaacggtaggtcaacaagatggttcggaagataatcaaacgacgacgatacaaacgatagtagaagtacaaccgcaattagaaatggaactaacgccggtagtacaaacgatagaagtaaattcgttttcgggttatttaaaactaacggataatgtatatataaaaaatgcggatatagtagaagaagcgaaaaaagtaaaaccgacggtagtagtaaatgcggcgaatgtatatctaaaacatggtggtggtgtagcgggtgcgttaaataaagcgacgaataatgcgatgcaagtagaatcggatgattatatagcgacgaatggtccgctaaaagtaggtggttcgtgtgtattatcgggtcataatctagcgaaacattgtctacatgtagtaggtccgaatgtaaataaaggtgaagatatacaactactaaaatcggcgtatgaaaattttaatcaacatgaagtactactagcgccgttattatcggcgggtatatttggtgcggacccgatacattcgttacgtgtgtgtgtagatacggtacgcacgaatgtatatttagcggtatttgataaaaatctatatgataaactagtatcgtcgtttttagaaatgaaatcggaaaaacaagtagaacaaaaaatagcggaaataccgaaagaagaagtaaaaccgtttataacggaatcgaaaccgtcggtagaacaacgtaaacaagatgataaaaaaataaaagcgtgtgtagaagaagtaacgacgacgctagaagaaacgaaatttctaacagaaaatttattactatatatagatataaatggtaatctacatccggattcggcgacgctagtatcggatatagatataacgtttttaaaaaaagatgcgccgtatatagtaggtgatgtagtacaagaaggtgtattaacggcggtagtaataccgacgaaaaaagcgggtggtacgacggaaatgctggcgaaagcgttacgtaaagtaccgacggataattatataacgacgtacccgggtcagggtttaaatggttacactgtagaggaggcaaagacagtgcttaaaaagtgtaaaagtgccttttacattctaccatctattatctctaatgagaagcaagaaattcttggaactgtttcttggaatttgcgagaaatgcttgcacatgcagaagaaacacgcaaattaatgcctgtctgtgtggaaactaaagccatagtttcaactatacagcgtaaatataagggtattaaaatacaagagggtgtggttgattatggtgctagattttacttttacaccagtaaaacaactgtagcgtcacttatcaacacacttaacgatctaaatgaaactcttgttacaatgccacttggctatgtaacacatggcttaaatttggaagaagctgctcggtatatgagatctctcaaagtgccagctacagtttctgtttcttcacctgatgctgttacagcgtataatggttatcttacttcttcttctaaaacacctgaagaacattttattgaaaccatctcacttgctggttcctataaagattggtcctattctggacaatctacacaactaggtatagaatttcttaagagaggtgataaaagtgtatattacactagtaatcctaccacattccacctagatggtgaagttatcacctttgacaatcttaagacacttctttctttgagagaagtgaggactattaaggtgtttacaacagtagacaacattaacctccacacgcaagttgtggacatgtcaatgacatatggacaacagtttggtccaacttatttggatggagctgatgttactaaaataaaacctcataattcacatgaaggtaaaacattttatgttttacctaatgatgacactctacgtgttgaggcttttgagtactaccacacaactgatcctagttttctgggtaggtacatgtcagcattaaatcacactaaaaagtggaaatacccacaagttaatggtttaacttctattaaatgggcagataacaactgttatcttgccactgcattgttaacactccaacaaatagagttgaagtttaatccacctgctctacaagatgcttattacagagcaagggctggtgaagctgctaacttttgtgcacttatcttagcctactgtaataagacagtaggtgagttaggtgatgttagagaaacaatgagttacttgtttcaacatgccaatttagattcttgcaaaagagtcttgaacgtggtgtgtaaaacttgtggacaacagcagacaacccttaagggtgtagaagctgttatgtacatgggcacactttcttatgaacaatttaagaaaggtgttcagataccttgtacgtgtggtaaacaagctacaaaatatctagtacaacaggagtcaccttttgttatgatgtcagcaccacctgctcagtatgaacttaagcatggtacatttacttgtgctagtgagtacactggtaattaccagtgtggtcactataaacatataacttctaaagaaactttgtattgcatagacggtgctttacttacaaagtcctcagaatacaaaggtcctattacggatgttttctacaaagaaaacagttacacaacaaccataaaaccagttacttataaattggatggtgttgtttgtacagaaattgaccctaagttggacaattattataagaaagacaattcttatttcacagagcaaccaattgatcttgtaccaaaccaaccatatccaaacgcaagcttcgataattttaagtttgtatgtgataatatcaaatttgctgatgatttaaaccagttaactggttataagaaacctgcttcaagagagcttaaagttacatttttccctgacttaaatggtgatgtggtggctattgattataaacactacacaccctcttttaagaaaggagctaaattgttacataaacctattgtttggcatgttaacaatgcaactaataaagccacgtataaaccaaatacctggtgtatacgttgtctttggagcacaaaaccagttgaaacatcaaattcgtttgatgtactgaagtcagaggacgcgcagggaatggataatcttgcctgcgaagatctaaaaccagtctctgaagaagtagtggaaaatcctaccatacagaaagacgttcttgagtgtaatgtgaaaactaccgaagttgtaggagacattatacttaaaccagcaaataatagtttaaaaattacagaagaggttggccacacagatctaatggctgcttatgtagacaattctagtcttactattaagaaacctaatgaattatctagagtattaggtttgaaaacccttgctactcatggtttagctgctgttaatagtgtcccttgggatactatagctaattatgctaagccttttcttaacaaagttgttagtacaactactaacatagttacacggtgtttaaaccgtgtttgtactaattatatgccttatttctttactttattgctacaattgtgtacttttactagaagtacaaattctagaattaaagcatctatgccgactactatagcaaagaatactgttaagagtgtcggtaaattttgtctagaggcttcatttaattatttgaagtcacctaatttttctaaactgataaatattataatttggtttttactattaagtgtttgcctaggttctttaatctactcaaccgctgctttaggtgttttaatgtctaatttaggcatgccttcttactgtactggttacagagaaggctatttgaactctactaatgtcactattgcaacctactgtactggttctataccttgtagtgtttgtcttagtggtttagattctttagacacctatccttctttagaaactatacaaattaccatttcatcttttaaatgggatttaactgcttttggcttagttgcagagtggtttttggcatatattcttttcactaggtttttctatgtacttggattggctgcaatcatgcaattgtttttcagctattttgcagtacattttattagtaattcttggcttatgtggttaataattaatcttgtacaaatggccccgatttcagctatggttagaatgtacatcttctttgcatcattttattatgtatggaaaagttatgtgcatgttgtagacggttgtaattcatcaacttgtatgatgtgttacaaacgtaatagagcaacaagagtcgaatgtacaactattgttaatggtgttagaaggtccttttatgtctatgctaatggaggtaaaggcttttgcaaactacacaattggaattgtgttaattgtgatacattctgtgctggtagtacatttattagtgatgaagttgcgagagacttgtcactacagtttaaaagaccaataaatcctactgaccagtcttcttacatcgttgatagtgttacagtgaagaatggttccatccatctttactttgataaagctggtcaaaagacttatgaaagacattctctctctcattttgttaacttagacaacctgagagctaataacactaaaggttcattgcctattaatgttatagtttttgatggtaaatcaaaatgtgaagaatcatctgcaaaatcagcgtctgtttactacagtcagcttatgtgtcaacctatactgttactagatcaggcattagtgtctgatgttggtgatagtgcggaagttgcagttaaaatgtttgatgcttacgttaatacgttttcatcaacttttaacgtaccaatggaaaaactcaaaacactagttgcaactgcagaagctgaacttgcaaagaatgtgtccttagacaatgtcttatctacttttatttcagcagctcggcaagggtttgttgattcagatgtagaaactaaagatgttgttgaatgtcttaaattgtcacatcaatctgacatagaagttactggcgatagttgtaataactatatgctcacctataacaaagttgaaaacatgacaccccgtgaccttggtgcttgtattgactgtagtgcgcgtcatattaatgcgcaggtagcaaaaagtcacaacattgctttgatatggaacgttaaagatttcatgtcattgtctgaacaactacgaaaacaaatacgtagtgctgctaaaaagaataacttaccttttaagttgacatgtgcaactactagacaagttgttaatgttgtaacaacaaagatagcacttaagggtggtaaaattgttaataattggttgaagcagttaattaaagtaacgctagtatttctatttgtagcggcgatattttatttaataacgccggtacatgtaatgtcgaaacatacggatttttcgtcggaaataataggttataaagcgatagatggtggtgtaactcgtgatatagcgtcgacggatacgtgttttgcgaataaacatgcggattttgatacgtggttttcgcaacgtggtggttcgtatacgaatgataaagcgtgtccgttaatagcggcggtaataacacgtgaagtaggttttgtagtaccgggtttaccgggtacgatattacgtacgacgaatggtgattttttacattttttaccgcgtgtattttcggcggtaggtaatatatgttatacgccgtcgaaactaatagaatatacggattttgcgacgtcggcgtgtgtattagcggcggaatgtacgatatttaaagatgcgtcgggtaaaccggtaccgtattgttatgatacgaatgtactagaaggttcggtagcgtatgaatcgttacgcccggatacacgttatgtactaatggatggttcgataatacaatttccgaatacgtatctagaaggttcggtacgtgtagtaacgacgtttgattcggaatattgtcgtcatggtacgtgtgaacgttcggaagcgggtgtatgtgtatcgacgtcggggcgttgggtactaaataatgattattatcgttcgttaccgggtgtattctgtggtgtagatgcggtaaatttactaacgaatatgtttacgccgctgatacaaccgataggtgcgttagatatatcggcgtcgatagtagcgggtggtatagtagcgatagtagtaacgtgtctagcgtattattttatgcgttttcgtcgtgcgtttggtgaatattcgcatgtagtagcgtttaatacgttactatttctaatgtcttttacagtactatgtttaacgccggtatattcttttttaccgggtgtatattcggtaatatatttatatttaacgttttatctaacgaatgatgtatcgtttttagcgcatatacaatggatggtaatgtttacgccgttagtaccgttttggataacaatagcgtatataatatgtatatcgacgaaacatttttattggtttttttcgaattatctgaaacgtcgtgtagtatttaatggtgtatctttttcgacgtttgaagaagcggcgctatgtacatttttattaaataaagaaatgtatctaaaattacgttcggatgtactattaccgctaacgcaatataatcgttatttagcgctatataataaatataaatatttttcgggtgcgatggatacgacgtcgtatcgtgaagcggcgtgttgtcatctagcgaaagcgctaaatgatttttcgaattcgggttcggatgtactatatcaaccgccgcaaacgtcgataacgtcggcggtattacaatcgggttttcgtaaaatggcgtttccgtcgggtaaagtagaaggttgtatggtacaagtaacgtgtggtacgacgacgctaaatggtctatggctagatgatgtagtatattgtccgcgtcatgtaatatgtacgtcggaagatatgctaaatccgaattatgaagatttactaatacgtaaatcgaatcataattttttagtacaagcgggtaatgtacaactacgtgtaataggtcattcgatgcaaaattgtgtactaaaactaaaagtagatacggcgaatccgaaaacaccgaaatataaatttgtacgtatacaaccgggtcaaacgttttcggtattagcgtgttataatggttctccgtcgggtgtatatcaatgtgcgatgcgtccgaattttacgattaaaggttcgtttctaaatggttcgtgtggttcggtaggttttaatatagattatgattgtgtatcgttttgttatatgcatcatatggaattaccgacgggtgtacatgcgggtacggatttagaaggtaatttttatggtccgtttgtagatcgtcaaacagcgcaagcggcgggtacggatacgacgattacggtaaatgtattagcgtggttatatgcggcggtaataaatggtgatcgttggtttctaaatcgttttacgacgacgctaaatgattttaatctagtagcgatgaaatataattatgaaccgctgacacaagatcatgtagatatactaggtccgctatcggcgcaaacgggtatagcggtattagatatgtgtgcgtcgttaaaagaattactacaaaatggtatgaatggtcgtacgatattaggttcggcgttattagaagatgaatttacgccgtttgatgtagtacgtcaatgttcgggtgtaacgtttcaatcggcggtaaaacgtacgataaaaggtacgcatcattggttattactaacgatattaacgtcgctattagtattagtacaatcgacgcaatggtcgttatttttttttttatatgaaaatgcgtttttaccgtttgcgatgggtataatagcgatgtcggcgtttgcgatgatgtttgtaaaacataagcatgcatttctctgtttgtttttgttaccttctcttgccactgtagcttattttaatatggtctatatgcctgctagttgggtgatgcgtattatgacatggttggatatggttgatactagtttgtctggttttaagctaaaagactgtgttatgtatgcatcagctgtagtgttactaatccttatgacagcaagaactgtgtatgatgatggtgctaggagagtgtggacacttatgaatgtcttgacactcgtttataaagtttattatggtaatgctttagatcaagccatttccatgtgggctcttataatctctgttacttctaactactcaggtgtagttacaactgtcatgtttttggccagaggtattgtttttatgtgtgttgagtattgccctattttcttcataactggtaatacacttcagtgtataatgctagtttattgtttcttaggctatttttgtacttgttactttggcctcttttgtttactcaaccgctactttagactgactcttggtgtttatgattacttagtttctacacaggagtttagatatatgaattcacagggactactcccacccaagaatagcatagatgccttcaaactcaacattaaattgttgggtgttggtggcaaaccttgtatcaaagtagccactgtacagtctaaaatgtcagatgtaaagtgcacatcagtagtcttactctcagttttgcaacaactcagagtagaatcatcatctaaattgtgggctcaatgtgtccagttacacaatgacattctcttagctaaagatactactgaagcctttgaaaaaatggtttcactactttctgttttgctttccatgcagggtgctgtagacataaacaagctttgtgaagaaatgctggacaacagggcaaccttacaagctatagcctcagagtttagttcccttccatcatatgcagcttttgctactgctcaagaagcttatgagcaggctgttgctaatggtgattctgaagttgttcttaaaaagttgaagaagtctttgaatgtggctaaatctgaatttgaccgtgatgcagccatgcaacgtaagttggaaaagatggctgatcaagctatgacccaaatgtataaacaggctagatctgaggacaagagggcaaaagttactagtgctatgcagacaatgcttttcactatgcttagaaagttggataatgatgcactcaacaacattatcaacaatgcaagagatggttgtgttcccttgaacataatacctcttacaacagcagccaaactaatggttgtcataccagactataacacatataaaaatacgtgtgatggtacaacatttacttatgcatcagcattgtgggaaatccaacaggttgtagatgcagatagtaaaattgttcaacttagtgaaattagtatggacaattcacctaatttagcatggcctcttattgtaacagctttaagggccaattctgctgtcaaattacagaataatgagcttagtcctgttgcactacgacagatgtcttgtgctgccggtactacacaaactgcttgcactgatgacaatgcgttagcttactacaacacaacaaagggaggtaggtttgtacttgcactgttatccgatttacaggatttgaaatgggctagattccctaagagtgatggaactggtactatctatacagaactggaaccaccttgtaggtttgttacagacacacctaaaggtcctaaagtgaagtatttatactttattaaaggattaaacaacctaaatagaggtatggtacttggtagtttagctgccacagtacgtctacaagctggtaatgcaacagaagtgcctgccaattcaactgtattatctttctgtgcttttgctgtagatgctgctaaagcttacaaagattatctagctagtgggggacaaccaatcactaattgtgttaagatgttgtgtacacacactggtactggtcaggcaataacagttacaccggaagccaatatggatcaagaatcctttggtggtgcatcgtgttgtctgtactgccgttgccacatagatcatccaaatcctaaaggattttgtgacttaaaaggtaagtatgtacaaatacctacaacttgtgctaatgaccctgtgggttttacacttaaaaacacagtctgtaccgtctgcggtatgtggaaaggttatggctgtagttgtgatcaactccgcgaacccatgcttcagtcagctgatgcacaatcgtttttaaacgggtttgcggtgtaagtgcagcccgtcttacaccgtgcggcacaggcactagtactgatgtcgtatacagggcttttgacatctacaatgataaagtagctggttttgctaaattcctaaaaactaattgttgtcgcttccaagaaaaggacgaagatgacaatttaattgattcttactttgtagttaagagacacactttctctaactaccaacatgaagaaacaatttataatttacttaaggattgtccagctgttgctaaacatgacttctttaagtttagaatagacggtgacatggtaccacatatatcacgtcaacgtcttactaaatacacaatggcagacctcgtctatgctttaaggcattttgatgaaggtaattgtgacacattaaaagaaatacttgtcacatacaattgttgtgatgatgattatttcaataaaaaggactggtatgattttgtagaaaacccagatatattacgcgtatacgccaacttaggtgaacgtgtacgccaagctttgttaaaaacagtacaattctgtgatgccatgcgaaatgctggtattgttggtgtactgacattagataatcaagatctcaatggtaactggtatgatttcggtgatttcatacaaaccacgccaggtagtggagttcctgttgtagattcttattattcattgttaatgcctatattaaccttgaccagggctttaactgcagagtcacatgttgacactgacttaacaaagccttacattaagtgggatttgttaaaatatgacttcacggaagagaggttaaaactctttgaccgttattttaaatattgggatcagacataccacccaaattgtgttaactgtttggatgacagatgcattctgcattgtgcaaactttaatgttttattctctacagtgttcccacctacaagttttggaccactagtgagaaaaatatttgttgatggtgttccatttgtagtttcaactggataccacttcagagagctaggtgttgtacataatcaggatgtaaacttacatagctctagacttagttttaaggaattacttgtgtatgctgctgaccctgctatgcacgctgcttctggtaatctattactagataaacgcactacgtgcttttcagtagctgcacttactaacaatgttgcttttcaaactgtcaaacccggtaattttaacaaagacttctatgactttgctgtgtctaagggtttctttaaggaaggaagttctgttgaattaaaacacttcttctttgctcaggatggtaatgctgctatcagcgattatgactactatcgttataatctaccaacaatgtgtgatatcagacaactactatttgtagttgaagttgttgataagtactttgattgttacgatggtggctgtattaatgctaaccaagtcatcgtcaacaacctagacaaatcagctggttttccatttaataaatggggtaaggctagactttattatgattcaatgagttatgaggatcaagatgcacttttcgcatatacaaaacgtaatgtcatccctactataactcaaatgaatcttaagtatgccattagtgcaaagaatagagctcgcaccgtagctggtgtctctatctgtagtactatgaccaatagacagtttcatcaaaaattattgaaatcaatagccgccactagaggagctactgtagtaattggaacaagcaaattctatggtggttggcacaacatgttaaaaactgtttatagtgatgtagaaaaccctcaccttatgggttgggattatcctaaatgtgatagagccatgcctaacatgcttagaattatggcctcacttgttcttgctcgcaaacatacaacgtgttgtagcttgtcacaccgtttctatagattagctaatgagtgtgctcaagtattgagtgaaatggtcatgtgtggcggttcactatatgttaaaccaggtggaacctcatcaggagatgccacaactgcttatgctaatagtgtttttaacatttgtcaagctgtcacggccaatgttaatgcacttttatctactgatggtaacaaaattgccgataagtatgtccgcaatttacaacacagactttatgagtgtctctatagaaatagagatgttgacacagactttgtgaatgagttttacgcatatttgcgtaaacatttctcaatgatgatactctctgacgatgctgttgtgtgtttcaatagcacttatgcatctcaaggtctagtggctagcataaagaactttaagtcagttctttattatcaaaacaatgtttttatgtctgaagcaaaatgttggactgagactgaccttactaaaggacctcatgaattttgctctcaacatacaatgctagttaaacagggtgatgattatgtgtaccttccttacccagatccatcaagaatcctaggggccggctgttttgtagatgatatcgtaaaaacagatggtacacttatgattgaacggttcgtgtctttagctatagatgcttacccacttactaaacatcctaatcaggagtatgctgatgtctttcatttgtacttacaatacataagaaagctacatgatgagttaacaggacacatgttagacatgtattctgttatgcttactaatgataacacttcaaggtattgggaacctgagttttatgaggctatgtacacaccgcatacagtcttacaggctgttggggcttgtgttctttgcaattcacagacttcattaagatgtggtgcttgcatacgtagaccattcttatgttgtaaatgctgttacgaccatgtcatatcaacatcacataaattagtcttgtctgttaatccgtatgtttgcaatgctccaggttgtgatgtcacagatgtgactcaactttacttaggaggtatgagctattattgtaaatcacataaaccacccattagttttccattgtgtgctaatggacaagtttttggtttatataaaaatacatgtgttggtagcgataatgttactgactttaatgcaattgcaacatgtgactggacaaatgctggtgattacattttagctaacacctgtactgaaagactcaagctttttgcagcagaaacgctcaaagctactgaggagacatttaaactgtcttatggtattgctactgtacgtgaagtgctgtctgacagagaattacatctttcatgggaagttggtaaacctagaccaccacttaaccgaaattatgtctttactggttatcgtgtaactaaaaacagtaaagtacaaataggagagtacacctttgaaaaaggtgactatggtgatgctgttgtttaccgaggtacaacaacttacaaattaaatgttggtgattattttgtgctgacatcacatacagtaatgccattaagtgcacctacactagtgccacaagagcactatgttagaattactggcttatacccaacactcaatatctcagatgagttttctagcaatgttgcaaattatcaaaaggttggtatgcaaaagtattctacactccagggaccacctggtactggtaagagtcattttgctattggcctagctctctactacccttctgctcgcatagtgtatacagcttgctctcatgccgctgttgatgcactatgtgagaaggcattaaaatatttgcctatagataaatgtagtagaattatacctgcacgtgctcgtgtagagtgttttgataaattcaaagtgaattcaacattagaacagtatgtcttttgtactgtaaatgcattgcctgagacgacagcagatatagttgtctttgatgaaatttcaatggccacaaattatgatttgagtgttgtcaatgccagattacgtgctaagcactatgtgtacattggcgaccctgctcaattacctgcaccacgcacattgctaactaagggcacactagaaccagaatatttcaattcagtgtgtagacttatgaaaactataggtccagacatgttcctcggaacttgtcggcgttgtcctgctgaaattgttgacactgtgagtgctttggtttatgataataagcttaaagcacataaagacaaatcagctcaatgctttaaaatgttttataagggtgttatcacgcatgatgtttcatctgcaattaacaggccacaaataggcgtggtaagagaattccttacacgtaaccctgcttggagaaaagctgtctttatttcaccttataattcacagaatgctgtagcctcaaagattttgggactaccaactcaaactgttgattcatcacagggctcagaatatgactatgtcatattcactcaaaccactgaaacagctcactcttgtaatgtaaacagatttaatgttgctattaccagagcaaaagtaggcatactttgcataatgtctgatagagacctttatgacaagttgcaatttacaagtcttgaaattccacgtaggaatgtggcaactttacaagctgaaaatgtaacaggactctttaaagattgtagtaaggtaatcactgggttacatcctacacaggcacctacacacctcagtgttgacactaaattcaaaactgaaggtttatgtgttgacatacctggcatacctaaggacatgacctatagaagactcatctctatgatgggttttaaaatgaattatcaagttaatggttaccctaacatgtttatcacccgcgaagaagctataagacatgtacgtgcatggattggcttcgatgtcgaggggtgtcatgctactagagaagctgttggtaccaatttacctttacagctaggtttttctacaggtgttaacctagttgctgtacctacaggttatgttgatacacctaataatacagatttttccagagttagtgctaaaccaccgcctggagatcaatttaaacacctcataccacttatgtacaaaggacttccttggaatgtagtgcgtataaagattgtacaaatgttaagtgacacacttaaaaatctctctgacagagtcgtatttgtcttatgggcacatggctttgagttgacatctatgaagtattttgtgaaaataggacctgagcgcacctgttgtctatgtgatagacgtgccacatgcttttccactgcttcagacacttatgcctgttggcatcattctattggatttgattacgtctataatccgtttatgattgatgttcaacaatggggttttacaggtaacctacaaagcaaccatgatctgtattgtcaagtccatggtaatgcacatgtagctagttgtgatgcaatcatgactaggtgtctagctgtccacgagtgctttgttaagcgtgttgactggactattgaatatcctataattggtgatgaactgaagattaatgcggcttgtagaaaggttcaacacatggttgttaaagctgcattattagcagacaaattcccagttcttcacgacattggtaaccctaaagctattaagtgtgtacctcaagctgatgtagaatggaagttctatgatgcacagccttgtagtgacaaagcttataaaatagaagaattattctattcttatgccacacattctgacaaattcacagatggtgtatgcctattttggaattgcaatgtcgatagatatcctgctaattccattgtttgtagatttgacactagagtgctatctaaccttaacttgcctggttgtgatggtggcagtttgtatgtaaataaacatgcattccacacaccagcttttgataaaagtgcttttgttaatttaaaacaattaccatttttctattactctgacagtccatgtgagtctcatggaaaacaagtagtgtcagatatagattatgtaccactaaagtctgctacgtgtataacacgttgcaatttaggtggtgctgtctgtagacatcatgctaatgagtacagattgtatctcgatgcttataacatgatgatctcagctggctttagcttgtgggtttacaaacaatttgatacttataacctctggaacacttttacaagacttcagagtttagaaaatgtggcttttaatgttgtaaataagggacactttgatggacaacagggtgaagtaccagtttctatcattaataacactgtttacacaaaagttgatggtgttgatgtagaattgtttgaaaataaaacaacattacctgttaatgtagcatttgagctttgggctaagcgcaacattaaaccagtaccagaggtgaaaatactcaataatttgggtgtggacattgctgctaatactgtgatctgggactacaaaagagatgctccagcacatatatctactattggtgtttgttctatgactgacatagccaagaaaccaactgaaacgatttgtgcaccactcactgtcttttttgatggtagagttgatggtcaagtagacttatttagaaatgcccgtaatggtgttcttattacagaaggtagtgttaaaggtttacaaccatctgtaggtcccaaacaagctagtcttaatggagtcacattaattggagaagccgtaaaaacacagttcaattattataagaaagttgatggtgttgtccaacaattacctgaaacttactttactcagagtagaaatttacaagaatttaaacccaggagtcaaatggaaattgatttcttagaattagctatggatgaattcattgaacggtataaattagaaggctatgccttcgaacatatcgtttatggagattttagtcatagtcagttaggtggtttacatctactgattggactagctaaacgttttaaggaatcaccttttgaattagaagattttattcctatggacagtacagttaaaaactatttcataacagatgcgcaaacaggttcatctaagtgtgtgtgttctgttattgatttattacttgatgattttgttgaaataataaaatcccaagatttatctgtagtttctaaggttgtcaaagtgactattgactatacagaaatttcatttatgctttggtgtaaagatggccatgtagaaacattttacccaaaattacaatctagtcaagcgtggcaaccgggtgttgctatgcctaatctttacaaaatgcaaagaatgctattagaaaagtgtgaccttcaaaattatggtgatagtgcaacattacctaaaggcataatgatgaatgtcgcaaaatatactcaactgtgtcaatatttaaacacattaacattagctgtaccctataatatgagagttatacattttggtgctggttctgataaaggagttgcaccaggtacagctgttttaagacagtggttgcctacgggtacgctgcttgtcgattcagatcttaatgactttgtctctgatgcagattcaactttgattggtgattgtgcaactgtacatacagctaataaatgggatctcattattagtgatatgtacgaccctaagactaaaaatgttacaaaagaaaatgactctaaagagggttttttcacttacatttgtgggtttatacaacaaaagctagctcttggaggttccgtggctataaagataacagaacattcttggaatgctgatctttataagctcatgggacacttcgcatggtggacagcctttgttactaatgtgaatgcgtcatcatctgaagcatttttaattggatgtaattatcttggcaaaccacgcgaacaaatagatggttatgtcatgcatgcaaattacatattttggaggaatacaaatccaattcagttgtcttcctattctttatttgacatgagtaaatttccccttaaattaaggggtactgctgttatgtctttaaaagaaggtcaaatcaatgatatgattttatctcttcttagtaaaggtagacttataattagagaaaacaacagagttgttatttctagtgatgttcttgttaacaactaaacgaacaatgtttgtttttcttgttttattgccactagtctctagtcagtgtgttaatcttacaaccagaactcaattaccccctgcatacactaattctttcacacgtggtgtttattaccctgacaaagttttcagatcctcagttttacattcaactcaggacttgttcttacctttcttttccaatgttacttggttccatgctatacatgtctctgggaccaatggtactaagaggtttgataaccctgtcctaccatttaatgatggtgtttattttgcttccactgagaagtctaacataataagaggctggatttttggtactactttagattcgaagacccagtccctacttattgttaataacgctactaatgttgttattaaagtctgtgaatttcaattttgtaatgatccatttttgggtgtttattaccacaaaaacaacaaaagttggatggaaagtgagttcagagtttattctagtgcgaataattgcacttttgaatatgtctctcagccttttcttatggaccttgaaggaaaacagggtaatttcaaaaatcttagggaatttgtgtttaagaatattgatggttattttaaaatatattctaagcacacgcctattaatttagtgcgtgatctcccccagggtttttcggctttagaaccattggtagatttgccaataggtattaacatcactaggtttcaaactttacttgctttacatagaagttatttgactcctggtgattcttcttcaggttggacagctggtgctgcagcttattatgtgggttatcttcaacctaggacttttctattaaaatataatgaaaatggaaccattacagatgctgtagactgtgcacttgaccctctctcagaaacaaagtgtacgttgaaatccttcactgtagaaaaaggaatctatcaaacttctaactttagagtccaaccaacagaatctattgttagatttcctaatattacaaacttgtgcccttttggtgaagtttttaacgccaccagatttgcatctgtttatgcttggaacaggaagagaatcagcaactgtgttgctgattattctgtcctatataattccgcatcattttccacttttaagtgttatggagtgtctcctactaaattaaatgatctctgctttactaatgtctatgcagattcatttgtaattagaggtgatgaagtcagacaaatcgctccagggcaaactggaaagattgctgattataattataaattaccagatgattttacaggctgcgttatagcttggaattctaacaatcttgattctaaggttggtggtaattataattacctgtatagattgtttaggaagtctaatctcaaaccttttgagagagatatttcaactgaaatctatcaggccggtagcacaccttgtaatggtgttgaaggttttaattgttactttcctttacaatcatatggtttccaacccactaatggtgttggttaccaaccatacagagtagtagtactttcttttgaacttctacatgcaccagcaactgtttgtggacctaaaaagtctactaatttggttaaaaacaaatgtgtcaatttcaacttcaatggtttaacaggcacaggtgttcttactgagtctaacaaaaagtttctgcctttccaacaatttggcagagacattgctgacactactgatgctgtccgtgatccacagacacttgagattcttgacattacaccatgttcttttggtggtgtcagtgttataacaccaggaacaaatacttctaaccaggttgctgttctttatcaggatgttaactgcacagaagtccctgttgctattcatgcagatcaacttactcctacttggcgtgtttattctacaggttctaatgtttttcaaacacgtgcaggctgtttaataggggctgaacatgtcaacaactcatatgagtgtgacatacccattggtgcaggtatatgcgctagttatcagactcagactaattctcctcggcgggcacgtagtgtagctagtcaatccatcattgcctacactatgtcacttggtgcagaaaattcagttgcttactctaataactctattgccatacccacaaattttactattagtgttaccacagaaattctaccagtgtctatgaccaagacatcagtagattgtacaatgtacatttgtggtgattcaactgaatgcagcaatcttttgttgcaatatggcagtttttgtacacaattaaaccgtgctttaactggaatagctgttgaacaagacaaaaacacccaagaagtttttgcacaagtcaaacaaatttacaaaacaccaccaattaaagattttggtggttttaatttttcacaaatattaccagatccatcaaaaccaagcaagaggtcatttattgaagatctacttttcaacaaagtgacacttgcagatgctggcttcatcaaacaatatggtgattgccttggtgatattgctgctagagacctcatttgtgcacaaaagtttaacggccttactgttttgccacctttgctcacagatgaaatgattgctcaatacacttctgcactgttagcgggtacaatcacttctggttggacctttggtgcaggtgctgcattacaaataccatttgctatgcaaatggcttataggtttaatggtattggagttacacagaatgttctctatgagaaccaaaaattgattgccaaccaatttaatagtgctattggcaaaattcaagactcactttcttccacagcaagtgcacttggaaaacttcaagatgtggtcaaccaaaatgcacaagctttaaacacgcttgttaaacaacttagctccaattttggtgcaatttcaagtgttttaaatgatatcctttcacgtcttgacaaagttgaggctgaagtgcaaattgataggttgatcacaggcagacttcaaagtttgcagacatatgtgactcaacaattaattagagctgcagaaatcagagcttctgctaatcttgctgctactaaaatgtcagagtgtgtacttggacaatcaaaaagagttgatttttgtggaaagggctatcatcttatgtccttccctcagtcagcacctcatggtgtagtcttcttgcatgtgacttatgtccctgcacaagaaaagaacttcacaactgctcctgccatttgtcatgatggaaaagcacactttcctcgtgaaggtgtctttgtttcaaatggcacacactggtttgtaacacaaaggaatttttatgaaccacaaatcattactacagacaacacatttgtgtctggtaactgtgatgttgtaataggaattgtcaacaacacagtttatgatcctttgcaacctgaattagactcattcaaggaggagttagataaatattttaagaatcatacatcaccagatgttgatttaggtgacatctctggcattaatgcttcagttgtaaacattcaaaaagaaattgaccgcctcaatgaggttgccaagaatttaaatgaatctctcatcgatctccaagaacttggaaagtatgagcagtatataaaatggccatggtacatttggctaggttttatagctggcttgattgccatagtaatggtgacaattatgctttgctgtatgaccagttgctgtagttgtctcaagggctgttgttcttgtggatcctgctgcaaatttgatgaagacgactctgagccagtgctcaaaggagtcaaattacattacacataaacgaacttatggatttgtttatgagaatcttcacaattggaactgtaactttgaagcaaggtgaaatcaaggatgctactccttcagattttgttcgcgctactgcaacgataccgatacaagcctcactccctttcggatggcttattgttggcgttgcacttcttgctgtttttcagagcgcttccaaaatcataaccctcaaaaagagatggcaactagcactctccaagggtgttcactttgtttgcaacttgctgttgttgtttgtaacagtttactcacaccttttgctcgttgctgctggccttgaagccccttttctctatctttatgctttagtctacttcttgcagagtataaactttgtaagaataataatgaggctttggctttgctggaaatgccgttccaaaaacccattactttatgatgccaactattttctttgctggcatactaattgttacgactattgtataccttacaatagtgtaacttcttcaattgtcattacttcaggtgatggcacaacaagtcctatttctgaacatgactaccagattggtggttatactgaaaaatgggaatctggagtaaaagactgtgttgtattacacagttacttcacttcagactattaccagctgtactcaactcaattgagtacagacactggtgttgaacatgttaccttcttcatctacaataaaattgttgatgagcctgaagaacatgtccaaattcacacaatcgacggttcatccggagttgttaatccagtaatggaaccaatttatgatgaaccgacgacgactactagcgtgcctttgtaagcacaagctgatgagtacgaacttatgtactcattcgtttcggaagagacaggtacgttaatagttaatagcgtacttctttttcttgctttcgtggtattcttgctagttacactagccatccttactgcgcttcgattgtgtgcgtactgctgcaatattgttaacgtgagtcttgtaaaaccttctttttacgtttactctcgtgttaaaaatctgaattcttctagagttcctgatcttctggtctaaacgaactaaatattatattagtttttctgtttggaactttaattttagccatggcagattccaacggtactattaccgttgaagagcttaaaaagctccttgaacaatggaacctagtaataggtttcctattccttacatggatttgtcttctacaatttgcctatgccaacaggaataggtttttgtatataattaagttaattttcctctggctgttatggccagtaactttagcttgttttgtgcttgctgctgtttacagaataaattggatcaccggtggaattgctatcgcaatggcttgtcttgtaggcttgatgtggctcagctacttcattgcttctttcagactgtttgcgcgtacgcgatccatgtggtcattcaatccagaaactaacattcttctcaacgtgccactccatggcactattctgaccagaccgcttctagaaagtgaactcgtaatcggagctgtgatccttcgtggacatcttcgtattgctggacaccatctaggacgctgtgacatcaaggacctgcctaaagaaatcactgttgctacatcacgaacgctttcttattacaaattgggagcttcgcagcgtgtagcaggtgactcaggttttgctgcatacagtcgctacaggattggcaactataaattaaacacagaccattccagtagcagtgacaatattgctttgcttgtacagtaagtgacaacagatgtttcatctcgttgactttcaggttactatagcagagatattactaattattatgaggacttttaaagtttccatttggaatcttgattacatcataaacctcataattaaaaatttatctaagtcactaactgagaataaatattctcaattagatgaagagcaaccaatggagattgattaaacgaacatgaaaattattcttttcttggcactgataacactcgctacttgtgagctttatcactaccaagagtgtgttagaggtacaacagtacttttaaaagaaccttgctcttctggaacatacgagggcaattcaccatttcatcctctagctgataacaaatttgcactgacttgctttagcactcaatttgcttttgcttgtcctgacggcgtaaaacacgtctatcagttacgtgccagatcagtttcacctaaactgttcatcagacaagaggaagttcaagaactttactctccaatttttcttattgttgcggcaatagtgtttataacactttgcttcacactcaaaagaaagacagaatgattgaactttcattaattgacttctatttgtgctttttagcctttctgctattccttgttttaattatgcttattatcttttggttctcacttgaactgcaagatcataatgaaacttgtcacgcctaaacgaacatgaaatttcttgttttcttaggaatcatcacaactgtagctgcatttcaccaagaatgtagtttacagtcatgtactcaacatcaaccatatgtagttgatgacccgtgtcctattcacttctattctaaatggtatattagagtaggagctagaaaatcagcacctttaattgaattgtgcgtggatgaggctggttctaaatcacccattcagtacatcgatatcggtaattatacagtttcctgtttaccttttacaattaattgccaggaacctaaattgggtagtcttgtagtgcgttgttcgttctatgaagactttttagagtatcatgacgttcgtgttgttttagatttcatctaaacgaacaaactaaaatgtctgataatggaccccaaaatcagcgaaatgcaccccgcattacgtttggtggaccctcagattcaactggcagtaaccagaatggagaacgcagtggggcgcgatcaaaacaacgtcggccccaaggtttacccaataatactgcgtcttggttcaccgctctcactcaacatggcaaggaagaccttaaattccctcgaggacaaggcgttccaattaacaccaatagcagtccagatgaccaaattggctactaccgaagagctaccagacgaattcgtggtggtgacggtaaaatgaaagatctcagtccaagatggtatttctactacctaggaactgggccagaagctggacttccctatggtgctaacaaagacggcatcatatgggttgcaactgagggagccttgaatacaccaaaagatcacattggcacccgcaatcctgctaacaatgctgcaatcgtgctacaacttcctcaaggaacaacattgccaaaaggcttctacgcagaagggagcagaggcggcagtcaagcctcttctcgttcctcatcacgtagtcgcaacagttcaagaaattcaactccaggcagcagtaggggaacttctcctgctagaatggctggcaatggcggtgatgctgctcttgctttgctgctgcttgacagattgaaccagcttgagagcaaaatgtctggtaaaggccaacaacaacaaggccaaactgtcactaagaaatctgctgctgaggcttctaagaagcctcggcaaaaacgtactgccactaaagcatacaatgtaacacaagctttcggcagacgtggtccagaacaaacccaaggaaattttggggaccaggaactaatcagacaaggaactgattacaaacattggccgcaaattgcacaatttgcccccagcgcttcagcgttcttcggaatgtcgcgcattggcatggaagtcacaccttcgggaacgtggttgacctacacaggtgccatcaaattggatgacaaagatccaaatttcaaagatcaagtcattttgctgaataagcatattgacgcatacaaaacattcccaccaacagagcctaaaaaggacaaaaagaagaaggctgatgaaactcaagccttaccgcagagacagaagaaacagcaaactgtgactcttcttcctgctgcagatttggatgatttctccaaacaattgcaacaatccatgagcagtgctgactcaactcaggcctaaactcatgcagaccacacaaggcagatgggctatataaacgttttcgcttttccgtttacgatatatagtctactcttgtgcagaatgaattctcgtaactacatagcacaagtagatgtagttaactttaatctcacatagcaatctttaatcagtgtgtaacattagggaggacttgaaagagccaccacattttcaccgaggccacgcggagtacgatcgagtgtacagtgaacaatgctagggagagctgcctatatggaagagccctaatgtgtaaaattaattttagtagtgctatccccatgtgattttaatagcttcttaggagaatgacaaaaaaaaaaaaaaaaaaaaaaaaaaaaaaaaaaaaaaaaaaaaaaaaaaaaaaaaaaagggtcggcatggcatctccacctcctcgcggtccgacctgggcatccgaaggaggacgcacgtccactcggatggctaagggagcagcacactggcggccgttactagggccgcgcccttcccaacagttgcgcagcctgaatggcgaatggagatccaatttttaagtgtataatgtgttaaactactgattctaattgtttgtgtattttagattcacagtcccaaggctcatttcaggcccctcagtcctcacagtctgttcatgatcataatcagccataccacatttgtagaggttttacttgctttaaaaaacctcccacacctccccctgaacctgaaacataaaatgaatgcaattgttgttgttaacttgtttattgcagcttataatggttacaaataaagcaatagcatcacaaatttcacaaataaagcatttttttcactgcattctagttgtggtttgtccaaactcatcaatgtatcttaaagcttgagtattctatagtctcacctaaatagcttggcgtaatcatggtcatagctgtttcctgtgtgaaattgttatccgctcacaattccacacaacatacgagccggaagcataaagtgtaaagcctggggtgcctaatgagtgagctaactcacattaattgcgttgcgctcactgcccgctttccagtcgggaaacctgtcgtgccagctgcattaatgaatcggccaacgcgaaccccttgcggccgcccgggccgtcgaccaattctcatgtttgacagcttatcatcgaatttctgccattcatccgcttattatcacttattcaggcgtagcaaccaggcgtttaagggcaccaataactgccttaaaaaaattacgccccgccctgccactcatcgcagtactgttgtaattcattaagcattctgccgacatggaagccatcacaaacggcatgatgaacctgaatcgccagcggcatcagcaccttgtcgccttgcgtataatatttgcccatggtgaaaacgggggcgaagaagttgtccatattggccacgtttaaatcaaaactggtgaaactcacccagggattggctgagacgaaaaacatattctcaataaaccctttagggaaataggccaggttttcaccgtaacacgccacatcttgcgaatatatgtgtagaaactgccggaaatcgtcgtggtattcactccagagcgatgaaaacgtttcagtttgctcatggaaaacggtgtaacaagggtgaacactatcccatatcaccagctcaccgtctttcattgccatacgaaattccggatgagcattcatcaggcgggcaagaatgtgaataaaggccggataaaacttgtgcttatttttctttacggtctttaaaaaggccgtaatatccagctgaacggtctggttataggtacattgagcaactgactgaaatgcctcaaaatgttctttacgatgccattgggatatatcaacggtggtatatccagtgatttttttctccattttagcttccttagctcctgaaaatctcgataactcaaaaaatacgcccggtagtgatcttatttcattatggtgaaagttggaacctcttacgtgccgatcaacgtctcattttcgccaaaagttggcccagggcttcccggtatcaacagggacaccaggatttatttattctgcgaagtgatcttccgtcacaggtatttattcgcgataagctcatggagcggcgtaaccgtcgcacaggaaggacagagaaagcgcggatctgggaagtgacggacagaacggtcaggacctggattggggaggcggttgccgccgctgctgctgacggtgtgacgttctctgttccggtcacaccacatacgttccgccattcctatgcgatgcacatgctgtatgccggtataccgctgaaagttctgcaaagcctgatgggacataagtccatcagttcaacggaagtctacacgaaggtttttgcgctggatgtggctgcccggcaccgggtgcagtttgcgatgccggagtctgatgcggttgcgatgctgaaacaattatcctgagaataaatgccttggcctttatatggaaatgtggaactgagtggatatgctgtttttgtctgttaaacagagaagctggctgttatccactgagaagcgaacgaaacagtcgggaaaatctcccattatcgtagagatccgcattattaatctcaggagcctgtgtagcgtttataggaagtagtgttctgtcatgatgcctgcaagcggtaacgaaaacgatttgaatatgccttcaggaacaatagaaatcttcgtgcggtgttacgttgaagtggagcggattatgtcagcaatggacagaacaacctaatgaacacagaaccatgatgtggtctgtccttttacagccagtagtgctcgccgcagtcgagcgacagggcgaagccctcggctggttgccctcgccgctgggctggcggccgtctatggccctgcaaacgcgccagaaacgccgtcgaagccgtgtgcgagacaccgcggccggccgccggcgttgtggatacctcgcggaaaacttggccctcactgacagatgaggggcggacgttgacacttgaggggccgactcacccggcgcggcgttgacagatgaggggcaggctcgatttcggccggcgacgtggagctggccagcctcgcaaatcggcgaaaacgcctgattttacgcgagtttcccacagatgatgtggacaagcctggggataagtgccctgcggtattgacacttgaggggcgcgactactgacagatgaggggcgcgatccttgacacttgaggggcagagtgctgacagatgaggggcgcacctattgacatttgaggggctgtccacaggcagaaaatccagcatttgcaagggtttccgcccgtttttcggccaccgctaacctgtcttttaacctgcttttaaaccaatatttataaaccttgtttttaaccagggctgcgccctgtgcgcgtgaccgcgcacgccgaaggggggtgcccccccttctcgaaccctcccggtcgagtgagcgaggaagcaccagggaacagcacttatatattctgcttacacacgatgcctgaaaaaacttcccttggggttatccacttatccacggggatatttttataattattttttttatagtttttagatcttcttttttagagcgccttgtaggcctttatccatgctggttctagagaaggtgttgtgacaaattgccctttcagtgtgacaaatcaccctcaaatgacagtcctgtctgtgacaaattgcccttaaccctgtgacaaattgccctcagaagaagctgttttttcacaaagttatccctgcttattgactcttttttatttagtgtgacaatctaaaaacttgtcacacttcacatggatctgtcatggcggaaacagcggttatcaatcacaagaaacgtaaaaatagcccgcgaatcgtccagtcaaacgacctcactgaggcggcatatagtctctcccgggatcaaaaacgtatgctgtatctgttcgttgaccagatcagaaaatctgatggcaccctacaggaacatgacggtatctgcgagatccatgttgctaaatatgctgaaatattcggattgacctctgcggaagccagtaaggatatacggcaggcattgaagagtttcgcggggaaggaagtggttttttatcgccctgaagaggatgccggcgatgaaaaaggctatgaatcttttccttggtttatcaaacgtgcgcacagtccatccagagggctttacagtgtacatatcaacccatatctcattcccttctttatcgggttacagaaccggtttacgcagtttcggcttagtgaaacaaaagaaatcaccaatccgtatgccatgcgtttatacgaatccctgtgtcagtatcgtaagccggatggctcaggcatcgtctctctgaaaatcgactggatcatagagcgttaccagctgcctcaaagttaccagcgtatgcctgacttccgccgccgcttcctgcaggtctgtgttaatgagatcaacagcagaactccaatgcgcctctcatacattgagaaaaagaaaggccgccagacgactcatatcgtattttccttccgcgatatcacttccatgacgacaggatagtctgagggttatctgtcacagatttgagggtggttcgtcacatttgttctgacctactgagggtaatttgtcacagttttgctgtttccttcagcctgcatggattttctcatactttttgaactgtaatttttaaggaagccaaatttgagggcagtttgtcacagttgatttccttctctttcccttcgtcatgtgacctgatatcgggggttagttcgtcatcattgatgagggttgattatcacagtttattactctgaattggctatccgcgtgtgtacctctacctggagtttttcccacggtggatatttcttcttgcgctgagcgtaagagctatctgacagaacagttcttctttgcttcctcgccagttcgctcgctatgctcggttacacggctgcggcg

SEQ ID NO: 15 - DNA, 35283 bp, Artificial Sequence
  Clone pCCI-4K-SARS-CoV-2-DWWWD. Based on SARS-CoV-2.
gatgtgctgcaaggcgattaagttgggtaacgccagggttttcccagtcacgacgttgtaaaacgacggccagtgaattgtaatacgactcactatagggcgaattctagttattaatagtaatcaattacggggtcattagttcatagcccatatatggagttccgcgttacataacttacggtaaatggcccgcctggctgaccgcccaacgacccccgcccattgacgtcaataatgacgtatgttcccatagtaacgccaatagggactttccattgacgtcaatgggtggagtatttacggtaaactgcccacttggcagtacatcaagtgtatcatatgccaagtacgccccctattgacgtcaatgacggtaaatggcccgcctggcattatgcccagtacatgaccttatgggactttcctacttggcagtacatctacgtattagtcatcgctattaccatggtgatgcggttttggcagtacatcaatgggcgtggatagcggtttgactcacggggatttccaagtctccaccccattgacgtcaatgggagtttgttttggcaccaaaatcaacgggactttccaaaatgtcgtaacaactccgccccattgacgcaaatgggcggtaggcgtgtacggtgggaggtctatataagcagagctggtttagtgaaccgtattaaaggtttataccttcccaggtaacaaaccaaccaactttcgatctcttgtagatctgttctctaaacgaactttaaaatctgtgtggctgtcactcggctgcatgcttagtgcactcacgcagtataattaataactaattactgtcgttgacaggacacgagtaactcgtctatcttctgcaggctgcttacggtttcgtccgtgttgcagccgatcatcagcacatctaggtttcgtccgggtgtgaccgaaaggtaagatggagagccttgtccctggtttcaacgagaaaacacacgtccaactcagtttgcctgttttacaggttcgcgacgtgctcgtacgtggctttggagactccgtggaggaggtcttatcagaggcacgtcaacatcttaaagatggcacttgtggcttagtagaagttgaaaaaggcgttttgcctcaacttgaacagccctatgtgttcatcaaacgttcggatgctcgaactgcacctcatggtcatgttatggttgagctggtagcagaactcgaaggcattcagtacggtcgtagtggtgagacacttggtgtccttgtccctcatgtgggcgaaataccagtggcttaccgcaaggttcttcttcgtaagaacggtaataaaggagctggtggccatagttacggcgccgatctaaagtcatttgacttaggcgacgagcttggcactgatccttatgaagattttcaagaaaactggaacactaaacatagcagtggtgttacccgtgaactcatgcgtgagcttaacggaggggcatacactcgctatgtcgataacaacttctgtggccctgatggctaccctcttgagtgcattaaagaccttctagcacgtgctggtaaagcttcatgcactttgtccgaacaactggactttattgacactaagaggggtgtatactgctgccgtgaacatgagcatgaaattgcttggtacacggaacgttctgaaaagagctatgaattgcagacaccttttgaaattaaattggcaaagaaatttgacaccttcaatggggaatgtccaaattttgtatttcccttaaattccataatcaagactattcaaccaagggttgaaaagaaaaagcttgatggctttatgggtagaattcgatctgtctatccagttgcgtcaccaaatgaatgcaaccaaatgtgcctttcaactctcatgaagtgtgatcattgtggtgaaacttcatggcagacgggcgattttgttaaagccacttgcgaattttgtggcactgagaatttgactaaagaaggtgccactacttgtggttacttaccccaaaatgctgttgttaaaatttattgtccagcatgtcacaattcagaagtaggacctgagcatagtcttgccgaataccataatgaatctggcttgaaaaccattcttcgtaagggtggtcgcactattgcctttggaggctgtgtgttctcttatgttggttgccataacaagtgtgcctattgggtcccgcgtgcgagtgcgaacataggttgtaatcatacgggtgtagtaggtgaaggttcggaaggtctaaatgataatctactagaaatactacaaaaagaaaaagtaaatataaatatagtaggtgattttaaactaaatgaagaaatagcgataatattagcgtcgttttcggcgtcgacgagtgcgtttgtagaaacggtaaaaggtttagattataaagcgtttaaacaaatagtagaatcgtgtggtaattttaaagtgacgaaaggtaaagcgaaaaaaggtgcgtggaatataggtgaacaaaaatcgatactaagtccgctatatgcgtttgcgtcggaagcggcgcgtgtagtacgttcgatattttcgcgtacgctagaaacggcgcaaaattcggtacgtgtattacaaaaagcggcgataacgatactagatggtatatcgcaatattcgctacgtctaatagatgcgatgatgtttacgtcggatttagcgacgaataatctagtagtaatggcgtatataacgggtggtgtagtacaattaacgtcgcaatggctaacgaatatatttggtacggtatatgaaaaactaaaaccggtactagattggctagaagaaaaatttaaagaaggtgtagaatttctacgtgatggttgggaaatagtaaaatttatatcgacgtgtgcgtgtgaaatagtaggtggtcaaatagtaacgtgtgcgaaagaaataaaagaatcggtacaaacgttttttaaactagtaaataaatttctagcgctatgtgcggattcgataataataggtggtgcgaaactaaaagcgctaaatctaggtgaaacgtttgtgacgcattcgaaaggtttatatcgtaaatgtgtaaaatcgcgtgaagaaacgggtctactaatgccgctaaaagcgccgaaagaaataatatttttagaaggtgaaacgctaccgacggaagtattaacggaagaagtagtattaaaaacgggtgatttacaaccgttagaacaaccgacgtcggaagcggtagaagcgccgttagtaggtacgccggtatgtataaatggtctaatgttactagaaataaaagatacggaaaaatattgtgcgctagcgccgaatatgatggtaacgaataatacgtttacgctaaaaggtggtgcgccgacgaaagtaacgtttggtgatgatacggtaatagaagtacaaggttataaatcggtaaatataacgtttgaactagatgaacgtatagataaagtactaaatgaaaaatgttcggcgtatacggtagaactaggtacggaagtaaatgaatttgcgtgtgtagtagcggatgcggtaataaaaacgttacaaccggtatcggaattactaacgccgctaggtatagatttagatgaatggtcgatggcgacgtattatttatttgatgaatcgggtgaatttaaattagcgtcgcatatgtattgttcgttttatccgccggatgaagatgaagaagaaggtgattgtgaagaagaagaatttgaaccgtcgacgcaatatgaatatggtacggaagatgattatcaaggtaaaccgttagaatttggtgcgacgtcggcggcgctacaaccggaagaagaacaagaagaagattggttggatgatgattcgcaacaaacggtaggtcaacaagatggttcggaagataatcaaacgacgacgatacaaacgatagtagaagtacaaccgcaattagaaatggaactaacgccggtagtacaaacgatagaagtaaattcgttttcgggttatttaaaactaacggataatgtatatataaaaaatgcggatatagtagaagaagcgaaaaaagtaaaaccgacggtagtagtaaatgcggcgaatgtatatctaaaacatggtggtggtgtagcgggtgcgttaaataaagcgacgaataatgcgatgcaagtagaatcggatgattatatagcgacgaatggtccgctaaaagtaggtggttcgtgtgtattatcgggtcataatctagcgaaacattgtctacatgtagtaggtccgaatgtaaataaaggtgaagatatacaactactaaaatcggcgtatgaaaattttaatcaacatgaagtactactagcgccgttattatcggcgggtatatttggtgcggacccgatacattcgttacgtgtgtgtgtagatacggtacgcacgaatgtatatttagcggtatttgataaaaatctatatgataaactagtatcgtcgtttttagaaatgaaatcggaaaaacaagtagaacaaaaaatagcggaaataccgaaagaagaagtaaaaccgtttataacggaatcgaaaccgtcggtagaacaacgtaaacaagatgataaaaaaataaaagcgtgtgtagaagaagtaacgacgacgctagaagaaacgaaatttctaacagaaaatttattactatatatagatataaatggtaatctacatccggattcggcgacgctagtatcggatatagatataacgtttttaaaaaaagatgcgccgtatatagtaggtgatgtagtacaagaaggtgtattaacggcggtagtaataccgacgaaaaaagcgggtggtacgacggaaatgctggcgaaagcgttacgtaaagtaccgacggataattatataacgacgtacccgggtcagggtttaaatggttacactgtagaggaggcaaagacagtgcttaaaaagtgtaaaagtgccttttacattctaccatctattatctctaatgagaagcaagaaattcttggaactgtttcttggaatttgcgagaaatgcttgcacatgcagaagaaacacgcaaattaatgcctgtctgtgtggaaactaaagccatagtttcaactatacagcgtaaatataagggtattaaaatacaagagggtgtggttgattatggtgctagattttacttttacaccagtaaaacaactgtagcgtcacttatcaacacacttaacgatctaaatgaaactcttgttacaatgccacttggctatgtaacacatggcttaaatttggaagaagctgctcggtatatgagatctctcaaagtgccagctacagtttctgtttcttcacctgatgctgttacagcgtataatggttatcttacttcttcttctaaaacacctgaagaacattttattgaaaccatctcacttgctggttcctataaagattggtcctattctggacaatctacacaactaggtatagaatttcttaagagaggtgataaaagtgtatattacactagtaatcctaccacattccacctagatggtgaagttatcacctttgacaatcttaagacacttctttctttgagagaagtgaggactattaaggtgtttacaacagtagacaacattaacctccacacgcaagttgtggacatgtcaatgacatatggacaacagtttggtccaacttatttggatggagctgatgttactaaaataaaacctcataattcacatgaaggtaaaacattttatgttttacctaatgatgacactctacgtgttgaggcttttgagtactaccacacaactgatcctagttttctgggtaggtacatgtcagcattaaatcacactaaaaagtggaaatacccacaagttaatggtttaacttctattaaatgggcagataacaactgttatcttgccactgcattgttaacactccaacaaatagagttgaagtttaatccacctgctctacaagatgcttattacagagcaagggctggtgaagctgctaacttttgtgcacttatcttagcctactgtaataagacagtaggtgagttaggtgatgttagagaaacaatgagttacttgtttcaacatgccaatttagattcttgcaaaagagtcttgaacgtggtgtgtaaaacttgtggacaacagcagacaacccttaagggtgtagaagctgttatgtacatgggcacactttcttatgaacaatttaagaaaggtgttcagataccttgtacgtgtggtaaacaagctacaaaatatctagtacaacaggagtcaccttttgttatgatgtcagcaccacctgctcagtatgaacttaagcatggtacatttacttgtgctagtgagtacactggtaattaccagtgtggtcactataaacatataacttctaaagaaactttgtattgcatagacggtgctttacttacaaagtcctcagaatacaaaggtcctattacggatgttttctacaaagaaaacagttacacaacaaccataaaaccagttacttataaattggatggtgttgtttgtacagaaattgaccctaagttggacaattattataagaaagacaattcttatttcacagagcaaccaattgatcttgtaccaaaccaaccatatccaaacgcaagcttcgataattttaagtttgtatgtgataatatcaaatttgctgatgatttaaaccagttaactggttataagaaacctgcttcaagagagcttaaagttacatttttccctgacttaaatggtgatgtggtggctattgattataaacactacacaccctcttttaagaaaggagctaaattgttacataaacctattgtttggcatgttaacaatgcaactaataaagccacgtataaaccaaatacctggtgtatacgttgtctttggagcacaaaaccagttgaaacatcaaattcgtttgatgtactgaagtcagaggacgcgcagggaatggataatcttgcctgcgaagatctaaaaccagtctctgaagaagtagtggaaaatcctaccatacagaaagacgttcttgagtgtaatgtgaaaactaccgaagttgtaggagacattatacttaaaccagcaaataatagtttaaaaattacagaagaggttggccacacagatctaatggctgcttatgtagacaattctagtcttactattaagaaacctaatgaattatctagagtattaggtttgaaaacccttgctactcatggtttagctgctgttaatagtgtcccttgggatactatagctaattatgctaagccttttcttaacaaagttgttagtacaactactaacatagttacacggtgtttaaaccgtgtttgtactaattatatgccttatttctttactttattgctacaattgtgtacttttactagaagtacaaattctagaattaaagcatctatgccgactactatagcaaagaatactgttaagagtgtcggtaaattttgtctagaggcttcatttaattatttgaagtcacctaatttttctaaactgataaatattataatttggtttttactattaagtgtttgcctaggttctttaatctactcaaccgctgctttaggtgttttaatgtctaatttaggcatgccttcttactgtactggttacagagaaggctatttgaactctactaatgtcactattgcaacctactgtactggttctataccttgtagtgtttgtcttagtggtttagattctttagacacctatccttctttagaaactatacaaattaccatttcatcttttaaatgggatttaactgcttttggcttagttgcagagtggtttttggcatatattcttttcactaggtttttctatgtacttggattggctgcaatcatgcaattgtttttcagctattttgcagtacattttattagtaattcttggcttatgtggttaataattaatcttgtacaaatggccccgatttcagctatggttagaatgtacatcttctttgcatcattttattatgtatggaaaagttatgtgcatgttgtagacggttgtaattcatcaacttgtatgatgtgttacaaacgtaatagagcaacaagagtcgaatgtacaactattgttaatggtgttagaaggtccttttatgtctatgctaatggaggtaaaggcttttgcaaactacacaattggaattgtgttaattgtgatacattctgtgctggtagtacatttattagtgatgaagttgcgagagacttgtcactacagtttaaaagaccaataaatcctactgaccagtcttcttacatcgttgatagtgttacagtgaagaatggttccatccatctttactttgataaagctggtcaaaagacttatgaaagacattctctctctcattttgttaacttagacaacctgagagctaataacactaaaggttcattgcctattaatgttatagtttttgatggtaaatcaaaatgtgaagaatcatctgcaaaatcagcgtctgtttactacagtcagcttatgtgtcaacctatactgttactagatcaggcattagtgtctgatgttggtgatagtgcggaagttgcagttaaaatgtttgatgcttacgttaatacgttttcatcaacttttaacgtaccaatggaaaaactcaaaacactagttgcaactgcagaagctgaacttgcaaagaatgtgtccttagacaatgtcttatctacttttatttcagcagctcggcaagggtttgttgattcagatgtagaaactaaagatgttgttgaatgtcttaaattgtcacatcaatctgacatagaagttactggcgatagttgtaataactatatgctcacctataacaaagttgaaaacatgacaccccgtgaccttggtgcttgtattgactgtagtgcgcgtcatattaatgcgcaggtagcaaaaagtcacaacattgctttgatatggaacgttaaagatttcatgtcattgtctgaacaactacgaaaacaaatacgtagtgctgctaaaaagaataacttaccttttaagttgacatgtgcaactactagacaagttgttaatgttgtaacaacaaagatagcacttaagggtggtaaaattgttaataattggttgaagcagttaattaaagttacacttgtgttcctttttgttgctgctattttctatttaataacacctgttcatgtcatgtctaaacatactgacttttcaagtgaaatcataggatacaaggctattgatggtggtgtcactcgtgacatagcatctacagatacttgttttgctaacaaacatgctgattttgacacatggtttagccagcgtggtggtagttatactaatgacaaagcttgcccattgattgctgcagtcataacaagagaagtgggttttgtcgtgcctggtttgcctggcacgatattacgcacaactaatggtgactttttgcatttcttacctagagtttttagtgcagttggtaacatctgttacacaccatcaaaacttatagagtacactgactttgcaacatcagcttgtgttttggctgctgaatgtacaatttttaaagatgcttctggtaagccagtaccatattgttatgataccaatgtactagaaggttctgttgcttatgaaagtttacgccctgacacacgttatgtgctcatggatggctctattattcaatttcctaacacctaccttgaaggttctgttagagtggtaacaacttttgattctgagtactgtaggcacggcacttgtgaaagatcagaagctggtgtttgtgtatctactagtggtagatgggtacttaacaatgattattacagatctttaccaggagttttctgtggtgtagatgctgtaaatttacttactaatatgtttacaccactaattcaacctattggtgctttggacatatcagcatctatagtagctggtggtattgtagctatcgtagtaacatgccttgcctactattttatgaggtttagaagagcttttggtgaatacagtcatgtagttgcctttaatactttactattccttatgtcattcactgtactctgtttaacaccagtttactcattcttacctggtgtttattctgttatttacttgtacttgacattttatcttactaatgatgtttcttttttagcacatattcagtggatggttatgttcacacctttagtacctttctggataacaattgcttatatcatttgtatttccacaaagcatttctattggttctttagtaattacctaaagagacgtgtagtctttaatggtgtttcctttagtacttttgaagaagctgcgctgtgcacctttttgttaaataaagaaatgtatctaaagttgcgtagtgatgtgctattacctcttacgcaatataatagatacttagctctttataataagtacaagtattttagtggagcaatggatacaactagctacagagaagctgcttgttgtcatctcgcaaaggctctcaatgacttcagtaactcaggttctgatgttctttaccaaccaccacaaacctctatcacctcagctgttttgcagagtggttttagaaaaatggcattcccatctggtaaagttgagggttgtatggtacaagtaacttgtggtacaactacacttaacggtctttggcttgatgacgtagtttactgtccaagacatgtgatctgcacctctgaagacatgcttaaccctaattatgaagatttactcattcgtaagtctaatcataatttcttggtacaggctggtaatgttcaactcagggttattggacattctatgcaaaattgtgtacttaagcttaaggttgatacagccaatcctaagacacctaagtataagtttgttcgcattcaaccaggacagactttttcagtgttagcttgttacaatggttcaccatctggtgtttaccaatgtgctatgaggcccaatttcactattaagggttcattccttaatggttcatgtggtagtgttggttttaacatagattatgactgtgtctctttttgttacatgcaccatatggaattaccaactggagttcatgctggcacagacttagaaggtaacttttatggaccttttgttgacaggcaaacagcacaagcagctggtacggacacaactattacagttaatgttttagcttggttgtacgctgctgttataaatggagacaggtggtttctcaatcgatttaccacaactcttaatgactttaaccttgtggctatgaagtacaattatgaacctctaacacaagaccatgttgacatactaggacctctttctgctcaaactggaattgccgttttagatatgtgtgcttcattaaaagaattactgcaaaatggtatgaatggacgtaccatattgggtagtgctttattagaagatgaatttacaccttttgatgttgttagacaatgctcaggtgttactttccaaagtgcagtgaaaagaacaatcaagggtacacaccactggttgttactcacaattttgacttcacttttagttttagtccagagtactcaatggtctttgttcttttttttgtatgaaaatgcctttttaccttttgctatgggtattattgctatgtctgcttttgcaatgatgtttgtcaaacataagcatgcgtttctatgtttatttttattaccgtcgctagcgacggtagcgtattttaatatggtatatatgccggcgtcgtgggtaatgcgtataatgacgtggttagatatggtagatacgtcgttatcgggttttaaactaaaagattgtgtaatgtatgcgtcggcggtagtattactaatactaatgacggcgcgtacggtatatgatgatggtgcgcgtcgtgtatggacgctaatgaatgtattaacgctagtatataaagtatattatgggaatgcgttagatcaagcgatatcgatgtgggcgctaataatatcggtaacgtcgaattattcgggtgtagtaacgacggtaatgtttttagcgcgtggtatagtatttatgtgtgtagaatattgtccgatattttttataacgggtaatacactacaatgtataatgctagtatattgttttttaggttatttttgtacgtgttattttggtctattttgtttactaaatcgttattttcgtctaacactaggtgtatatgattatttagtatcgacgcaagaatttcgttatatgaattcgcaaggtctactaccgccgaaaaattcgatagatgcgtttaaactaaatataaaattattaggtgtaggtggtaaaccgtgtataaaagtagcgacggtacaatcgaaaatgtcggatgtaaaatgtacatcggtagtattactatcggtattacaacaactacgtgtagaatcgtcgtcgaaattatgggcgcaatgtgtacaattacataatgatatactattagcgaaagatacgacggaagcgtttgaaaaaatggtatcgctactatcggtattactatcgatgcaaggtgcggtagatataaataaactatgtgaagaaatgctagataatcgtgcgacgttacaagcgatagcgtcggaattttcgtcgctaccgtcgtatgcggcgtttgcgacggcgcaagaagcgtatgaacaagcggtagcgaatggtgattcggaagtagtactaaaaaaattaaaaaaatcgttaaatgtagcgaaatcggaatttgatcgtgatgcggcgatgcaacgtaaattagaaaaaatggcggatcaagcgatgacgcaaatgtataaacaagcgcgttcggaagataaacgtgcgaaagtaacgtcggcgatgcaaacgatgctatttacgatgctacgtaaattagataatgatgcgctaaataatataataaataatgcgcgtgatggttgtgtaccgttaaatataataccgctaacgacggcggcgaaactaatggtagtaataccggattataatacatataaaaatacgtgtgatggtacgacgtttacgtatgcgtcggcgttatgggaaatacaacaagtagtagatgcggattcgaaaatagtacaactatcggaaatatcgatggataattcgccgaatttagcgtggccgctaatagtaacggcgttacgtgcgaattcggcggtaaaattacaaaataatgaactatcgccggtagcgctacgacagatgtcttgtgctgccggtactacacaaactgcttgcactgatgacaatgcgttagcttactacaacacaacaaagggaggtaggtttgtacttgcactgttatccgatttacaggatttgaaatgggctagattccctaagagtgatggaactggtactatctatacagaactggaaccaccttgtaggtttgttacagacacacctaaaggtcctaaagtgaagtatttatactttattaaaggattaaacaacctaaatagaggtatggtacttggtagtttagctgccacagtacgtctacaagctggtaatgcaacagaagtgcctgccaattcaactgtattatctttctgtgcttttgctgtagatgctgctaaagcttacaaagattatctagctagtgggggacaaccaatcactaattgtgttaagatgttgtgtacacacactggtactggtcaggcaataacagttacaccggaagccaatatggatcaagaatcctttggtggtgcatcgtgttgtctgtactgccgttgccacatagatcatccaaatcctaaaggattttgtgacttaaaaggtaagtatgtacaaatacctacaacttgtgctaatgaccctgtgggttttacacttaaaaacacagtctgtaccgtctgcggtatgtggaaaggttatggctgtagttgtgatcaactccgcgaacccatgcttcagtcagctgatgcacaatcgtttttaaacgggtttgcggtgtaagtgcagcccgtcttacaccgtgcggcacaggcactagtactgatgtcgtatacagggcttttgacatctacaatgataaagtagctggttttgctaaattcctaaaaactaattgttgtcgcttccaagaaaaggacgaagatgacaatttaattgattcttactttgtagttaagagacacactttctctaactaccaacatgaagaaacaatttataatttacttaaggattgtccagctgttgctaaacatgacttctttaagtttagaatagacggtgacatggtaccacatatatcacgtcaacgtcttactaaatacacaatggcagacctcgtctatgctttaaggcattttgatgaaggtaattgtgacacattaaaagaaatacttgtcacatacaattgttgtgatgatgattatttcaataaaaaggactggtatgattttgtagaaaacccagatatattacgcgtatacgccaacttaggtgaacgtgtacgccaagctttgttaaaaacagtacaattctgtgatgccatgcgaaatgctggtattgttggtgtactgacattagataatcaagatctcaatggtaactggtatgatttcggtgatttcatacaaaccacgccaggtagtggagttcctgttgtagattcttattattcattgttaatgcctatattaaccttgaccagggctttaactgcagagtcacatgttgacactgacttaacaaagccttacattaagtgggatttgttaaaatatgacttcacggaagagaggttaaaactctttgaccgttattttaaatattgggatcagacataccacccaaattgtgttaactgtttggatgacagatgcattctgcattgtgcaaactttaatgttttattctctacagtgttcccacctacaagttttggaccactagtgagaaaaatatttgttgatggtgttccatttgtagtttcaactggataccacttcagagagctaggtgttgtacataatcaggatgtaaacttacatagctctagacttagttttaaggaattacttgtgtatgctgctgaccctgctatgcacgctgcttctggtaatctattactagataaacgcactacgtgcttttcagtagctgcacttactaacaatgttgcttttcaaactgtcaaacccggtaattttaacaaagacttctatgactttgctgtgtctaagggtttctttaaggaaggaagttctgttgaattaaaacacttcttctttgctcaggatggtaatgctgctatcagcgattatgactactatcgttataatctaccaacaatgtgtgatatcagacaactactatttgtagttgaagttgttgataagtactttgattgttacgatggtggctgtattaatgctaaccaagtcatcgtcaacaacctagacaaatcagctggttttccatttaataaatggggtaaggctagactttattatgattcaatgagttatgaggatcaagatgcacttttcgcatatacaaaacgtaatgtcatccctactataactcaaatgaatcttaagtatgccattagtgcaaagaatagagctcgcaccgtagctggtgtctctatctgtagtactatgaccaatagacagtttcatcaaaaattattgaaatcaatagccgccactagaggagctactgtagtaattggaacaagcaaattctatggtggttggcacaacatgttaaaaactgtttatagtgatgtagaaaaccctcaccttatgggttgggattatcctaaatgtgatagagccatgcctaacatgcttagaattatggcctcacttgttcttgctcgcaaacatacaacgtgttgtagcttgtcacaccgtttctatagattagctaatgagtgtgctcaagtattgagtgaaatggtcatgtgtggcggttcactatatgttaaaccaggtggaacctcatcaggagatgccacaactgcttatgctaatagtgtttttaacatttgtcaagctgtcacggccaatgttaatgcacttttatctactgatggtaacaaaattgccgataagtatgtccgcaatttacaacacagactttatgagtgtctctatagaaatagagatgttgacacagactttgtgaatgagttttacgcatatttgcgtaaacatttctcaatgatgatactctctgacgatgctgttgtgtgtttcaatagcacttatgcatctcaaggtctagtggctagcataaagaactttaagtcagttctttattatcaaaacaatgtttttatgtctgaagcaaaatgttggactgagactgaccttactaaaggacctcatgaattttgctctcaacatacaatgctagttaaacagggtgatgattatgtgtaccttccttacccagatccatcaagaatcctaggggccggctgttttgtagatgatatcgtaaaaacagatggtacacttatgattgaacggttcgtgtctttagctatagatgcttacccacttactaaacatcctaatcaggagtatgctgatgtctttcatttgtacttacaatacataagaaagctacatgatgagttaacaggacacatgttagacatgtattctgttatgcttactaatgataacacttcaaggtattgggaacctgagttttatgaggctatgtacacaccgcatacagtcttacaggctgttggggcttgtgttctttgcaattcacagacttcattaagatgtggtgcttgcatacgtagaccattcttatgttgtaaatgctgttacgaccatgtcatatcaacatcacataaattagtcttgtctgttaatccgtatgtttgcaatgctccaggttgtgatgtcacagatgtgactcaactttacttaggaggtatgagctattattgtaaatcacataaaccacccattagttttccattgtgtgctaatggacaagtttttggtttatataaaaatacatgtgttggtagcgataatgttactgactttaatgcaattgcaacatgtgactggacaaatgctggtgattacattttagctaacacctgtactgaaagactcaagctttttgcagcagaaacgctcaaagctactgaggagacatttaaactgtcttatggtattgctactgtacgtgaagtgctgtctgacagagaattacatctttcatgggaagttggtaaacctagaccaccacttaaccgaaattatgtctttactggttatcgtgtaactaaaaacagtaaagtacaaataggagagtacacctttgaaaaaggtgactatggtgatgctgttgtttaccgaggtacaacaacttacaaattaaatgttggtgattattttgtgctgacatcacatacagtaatgccattaagtgcacctacactagtgccacaagagcactatgttagaattactggcttatacccaacactcaatatctcagatgagttttctagcaatgttgcaaattatcaaaaggttggtatgcaaaagtattctacactccagggaccacctggtactggtaagagtcattttgctattggcctagctctctactacccttctgctcgcatagtgtatacagcttgctctcatgccgctgttgatgcactatgtgagaaggcattaaaatatttgcctatagataaatgtagtagaattatacctgcacgtgctcgtgtagagtgttttgataaattcaaagtgaattcaacattagaacagtatgtcttttgtactgtaaatgcattgcctgagacgacagcagatatagttgtctttgatgaaatttcaatggccacaaattatgatttgagtgttgtcaatgccagattacgtgctaagcactatgtgtacattggcgaccctgctcaattacctgcaccacgcacattgctaactaagggcacactagaaccagaatatttcaattcagtgtgtagacttatgaaaactataggtccagacatgttcctcggaacttgtcggcgttgtcctgctgaaattgttgacactgtgagtgctttggtttatgataataagcttaaagcacataaagacaaatcagctcaatgctttaaaatgttttataagggtgttatcacgcatgatgtttcatctgcaattaacaggccacaaataggcgtggtaagagaattccttacacgtaaccctgcttggagaaaagctgtctttatttcaccttataattcacagaatgctgtagcctcaaagattttgggactaccaactcaaactgttgattcatcacagggctcagaatatgactatgtcatattcactcaaaccactgaaacagctcactcttgtaatgtaaacagatttaatgttgctattaccagagcaaaagtaggcatactttgcataatgtctgatagagacctttatgacaagttgcaatttacaagtcttgaaattccacgtaggaatgtggcaactttacaagctgaaaatgtaacaggactctttaaagattgtagtaaggtaatcactgggttacatcctacacaggcacctacacacctcagtgttgacactaaattcaaaactgaaggtttatgtgttgacatacctggcatacctaaggacatgacctatagaagactcatctctatgatgggttttaaaatgaattatcaagttaatggttaccctaacatgtttatcacccgcgaagaagctataagacatgtacgtgcatggattggcttcgatgtcgaggggtgtcatgctactagagaagctgttggtaccaatttacctttacagctaggtttttctacaggtgttaacctagttgctgtacctacaggttatgttgatacacctaataatacagatttttccagagttagtgctaaaccaccgcctggagatcaatttaaacacctcataccacttatgtacaaaggacttccttggaatgtagtgcgtataaagattgtacaaatgttaagtgacacacttaaaaatctctctgacagagtcgtatttgtcttatgggcacatggctttgagttgacatctatgaagtattttgtgaaaataggacctgagcgcacctgttgtctatgtgatagacgtgccacatgcttttccactgcttcagacacttatgcctgttggcatcattctattggatttgattacgtctataatccgtttatgattgatgttcaacaatggggttttacaggtaacctacaaagcaaccatgatctgtattgtcaagtccatggtaatgcacatgtagctagttgtgatgcaatcatgactaggtgtctagctgtccacgagtgctttgttaagcgtgttgactggactattgaatatcctataattggtgatgaactgaagattaatgcggcttgtagaaaggttcaacacatggttgttaaagctgcattattagcagacaaattcccagttcttcacgacattggtaaccctaaagctattaagtgtgtacctcaagctgatgtagaatggaagttctatgatgcacagccttgtagtgacaaagcttataaaatagaagaattattctattcttatgccacacattctgacaaattcacagatggtgtatgcctattttggaattgcaatgtcgatagatatcctgctaattccattgtttgtagatttgacactagagtgctatctaaccttaacttgcctggttgtgatggtggcagtttgtatgtaaataaacatgcattccacacaccagcttttgataaaagtgcttttgttaatttaaaacaattaccatttttctattactctgacagtccatgtgagtctcatggaaaacaagtagtgtcagatatagattatgtaccactaaagtctgctacgtgtataacacgttgcaatttaggtggtgctgtctgtagacatcatgctaatgagtacagattgtatctcgatgcttataacatgatgatctcagctggctttagcttgtgggtttacaaacaatttgatacttataacctctggaacacttttacaagacttcagagtttagaaaatgtggcttttaatgttgtaaataagggacactttgatggacaacagggtgaagtaccagtttctatcattaataacactgtttacacaaaagttgatggtgttgatgtagaattgtttgaaaataaaacaacattacctgttaatgtagcatttgagctttgggctaagcgcaacattaaaccagtaccagaggtgaaaatactcaataatttgggtgtggacattgctgctaatactgtgatctgggactacaaaagagatgctccagcacatatatctactattggtgtttgttctatgactgacatagccaagaaaccaactgaaacgatttgtgcaccactcactgtcttttttgatggtagagttgatggtcaagtagacttatttagaaatgcccgtaatggtgttcttattacagaaggtagtgttaaaggtttacaaccatctgtaggtcccaaacaagctagtcttaatggagtcacattaattggagaagccgtaaaaacacagttcaattattataagaaagttgatggtgttgtccaacaattacctgaaacttactttactcagagtagaaatttacaagaatttaaacccaggagtcaaatggaaattgatttcttagaattagctatggatgaattcattgaacggtataaattagaaggctatgccttcgaacatatcgtttatggagattttagtcatagtcagttaggtggtttacatctactgattggactagctaaacgttttaaggaatcaccttttgaattagaagattttattcctatggacagtacagttaaaaactatttcataacagatgcgcaaacaggttcatctaagtgtgtgtgttctgttattgatttattacttgatgattttgttgaaataataaaatcccaagatttatctgtagtttctaaggttgtcaaagtgactattgactatacagaaatttcatttatgctttggtgtaaagatggccatgtagaaacattttacccaaaattacaatctagtcaagcgtggcaaccgggtgttgctatgcctaatctttacaaaatgcaaagaatgctattagaaaagtgtgaccttcaaaattatggtgatagtgcaacattacctaaaggcataatgatgaatgtcgcaaaatatactcaactgtgtcaatatttaaacacattaacattagctgtaccctataatatgagagttatacattttggtgctggttctgataaaggagttgcaccaggtacagctgttttaagacagtggttgcctacgggtacgctgcttgtcgattcagatcttaatgactttgtctctgatgcagattcaactttgattggtgattgtgcaactgtacatacagctaataaatgggatctcattattagtgatatgtacgaccctaagactaaaaatgttacaaaagaaaatgactctaaagagggttttttcacttacatttgtgggtttatacaacaaaagctagctcttggaggttccgtggctataaagataacagaacattcttggaatgctgatctttataagctcatgggacacttcgcatggtggacagcctttgttactaatgtgaatgcgtcatcatctgaagcatttttaattggatgtaattatcttggcaaaccacgcgaacaaatagatggttatgtcatgcatgcaaattacatattttggaggaatacaaatccaattcagttgtcttcctattctttatttgacatgagtaaatttccccttaaattaaggggtactgctgttatgtctttaaaagaaggtcaaatcaatgatatgattttatctcttcttagtaaaggtagacttataattagagaaaacaacagagttgttatttctagtgatgttcttgttaacaactaaacgaacaatgtttgtttttcttgttttattgccactagtctctagtcagtgtgttaatcttacaaccagaactcaattaccccctgcatacactaattctttcacacgtggtgtttattaccctgacaaagttttcagatcctcagttttacattcaactcaggacttgttcttacctttcttttccaatgttacttggttccatgctatacatgtctctgggaccaatggtactaagaggtttgataaccctgtcctaccatttaatgatggtgtttattttgcttccactgagaagtctaacataataagaggctggatttttggtactactttagattcgaagacccagtccctacttattgttaataacgctactaatgttgttattaaagtctgtgaatttcaattttgtaatgatccatttttgggtgtttattaccacaaaaacaacaaaagttggatggaaagtgagttcagagtttattctagtgcgaataattgcacttttgaatatgtctctcagccttttcttatggaccttgaaggaaaacagggtaatttcaaaaatcttagggaatttgtgtttaagaatattgatggttattttaaaatatattctaagcacacgcctattaatttagtgcgtgatctcccccagggtttttcggctttagaaccattggtagatttgccaataggtattaacatcactaggtttcaaactttacttgctttacatagaagttatttgactcctggtgattcttcttcaggttggacagctggtgctgcagcttattatgtgggttatcttcaacctaggacttttctattaaaatataatgaaaatggaaccattacagatgctgtagactgtgcacttgaccctctctcagaaacaaagtgtacgttgaaatccttcactgtagaaaaaggaatctatcaaacttctaactttagagtccaaccaacagaatctattgttagatttcctaatattacaaacttgtgcccttttggtgaagtttttaacgccaccagatttgcatctgtttatgcttggaacaggaagagaatcagcaactgtgttgctgattattctgtcctatataattccgcatcattttccacttttaagtgttatggagtgtctcctactaaattaaatgatctctgctttactaatgtctatgcagattcatttgtaattagaggtgatgaagtcagacaaatcgctccagggcaaactggaaagattgctgattataattataaattaccagatgattttacaggctgcgttatagcttggaattctaacaatcttgattctaaggttggtggtaattataattacctgtatagattgtttaggaagtctaatctcaaaccttttgagagagatatttcaactgaaatctatcaggccggtagcacaccttgtaatggtgttgaaggttttaattgttactttcctttacaatcatatggtttccaacccactaatggtgttggttaccaaccatacagagtagtagtactttcttttgaacttctacatgcaccagcaactgtttgtggacctaaaaagtctactaatttggttaaaaacaaatgtgtcaatttcaacttcaatggtttaacaggcacaggtgttcttactgagtctaacaaaaagtttctgcctttccaacaatttggcagagacattgctgacactactgatgctgtccgtgatccacagacacttgagattcttgacattacaccatgttcttttggtggtgtcagtgttataacaccaggaacaaatacttctaaccaggttgctgttctttatcaggatgttaactgcacagaagtccctgttgctattcatgcagatcaacttactcctacttggcgtgtttattctacaggttctaatgtttttcaaacacgtgcaggctgtttaataggggctgaacatgtcaacaactcatatgagtgtgacatacccattggtgcaggtatatgcgctagttatcagactcagactaattctcctcggcgggcacgtagtgtagctagtcaatccatcattgcctacactatgtcacttggtgcagaaaattcagttgcttactctaataactctattgccatacccacaaattttactattagtgttaccacagaaattctaccagtgtctatgaccaagacatcagtagattgtacaatgtacatttgtggtgattcaactgaatgcagcaatcttttgttgcaatatggcagtttttgtacacaattaaaccgtgctttaactggaatagctgttgaacaagacaaaaacacccaagaagtttttgcacaagtcaaacaaatttacaaaacaccaccaattaaagattttggtggttttaatttttcacaaatattaccagatccatcaaaaccaagcaagaggtcatttattgaagatctacttttcaacaaagtgacacttgcagatgctggcttcatcaaacaatatggtgattgccttggtgatattgctgctagagacctcatttgtgcacaaaagtttaacggccttactgttttgccacctttgctcacagatgaaatgattgctcaatacacttctgcactgttagcgggtacaatcacttctggttggacctttggtgcaggtgctgcattacaaataccatttgctatgcaaatggcttataggtttaatggtattggagttacacagaatgttctctatgagaaccaaaaattgattgccaaccaatttaatagtgctattggcaaaattcaagactcactttcttccacagcaagtgcacttggaaaacttcaagatgtggtcaaccaaaatgcacaagctttaaacacgcttgttaaacaacttagctccaattttggtgcaatttcaagtgttttaaatgatatcctttcacgtcttgacaaagttgaggctgaagtgcaaattgataggttgatcacaggcagacttcaaagtttgcagacatatgtgactcaacaattaattagagctgcagaaatcagagcttctgctaatcttgctgctactaaaatgtcagagtgtgtacttggacaatcaaaaagagttgatttttgtggaaagggctatcatcttatgtccttccctcagtcagcacctcatggtgtagtcttcttgcatgtgacttatgtccctgcacaagaaaagaacttcacaactgctcctgccatttgtcatgatggaaaagcacactttcctcgtgaaggtgtctttgtttcaaatggcacacactggtttgtaacacaaaggaatttttatgaaccacaaatcattactacagacaacacatttgtgtctggtaactgtgatgttgtaataggaattgtcaacaacacagtttatgatcctttgcaacctgaattagactcattcaaggaggagttagataaatattttaagaatcatacatcaccagatgttgatttaggtgacatctctggcattaatgcttcagttgtaaacattcaaaaagaaattgaccgcctcaatgaggttgccaagaatttaaatgaatctctcatcgatctccaagaacttggaaagtatgagcagtatataaaatggccatggtacatttggctaggttttatagctggcttgattgccatagtaatggtgacaattatgctttgctgtatgaccagttgctgtagttgtctcaagggctgttgttcttgtggatcctgctgcaaatttgatgaagacgactctgagccagtgctcaaaggagtcaaattacattacacataaacgaacttatggatttgtttatgagaatcttcacaattggaactgtaactttgaagcaaggtgaaatcaaggatgctactccttcagattttgttcgcgctactgcaacgataccgatacaagcctcactccctttcggatggcttattgttggcgttgcacttcttgctgtttttcagagcgcttccaaaatcataaccctcaaaaagagatggcaactagcactctccaagggtgttcactttgtttgcaacttgctgttgttgtttgtaacagtttactcacaccttttgctcgttgctgctggccttgaagccccttttctctatctttatgctttagtctacttcttgcagagtataaactttgtaagaataataatgaggctttggctttgctggaaatgccgttccaaaaacccattactttatgatgccaactattttctttgctggcatactaattgttacgactattgtataccttacaatagtgtaacttcttcaattgtcattacttcaggtgatggcacaacaagtcctatttctgaacatgactaccagattggtggttatactgaaaaatgggaatctggagtaaaagactgtgttgtattacacagttacttcacttcagactattaccagctgtactcaactcaattgagtacagacactggtgttgaacatgttaccttcttcatctacaataaaattgttgatgagcctgaagaacatgtccaaattcacacaatcgacggttcatccggagttgttaatccagtaatggaaccaatttatgatgaaccgacgacgactactagcgtgcctttgtaagcacaagctgatgagtacgaacttatgtactcattcgtttcggaagagacaggtacgttaatagttaatagcgtacttctttttcttgctttcgtggtattcttgctagttacactagccatccttactgcgcttcgattgtgtgcgtactgctgcaatattgttaacgtgagtcttgtaaaaccttctttttacgtttactctcgtgttaaaaatctgaattcttctagagttcctgatcttctggtctaaacgaactaaatattatattagtttttctgtttggaactttaattttagccatggcagattccaacggtactattaccgttgaagagcttaaaaagctccttgaacaatggaacctagtaataggtttcctattccttacatggatttgtcttctacaatttgcctatgccaacaggaataggtttttgtatataattaagttaattttcctctggctgttatggccagtaactttagcttgttttgtgcttgctgctgtttacagaataaattggatcaccggtggaattgctatcgcaatggcttgtcttgtaggcttgatgtggctcagctacttcattgcttctttcagactgtttgcgcgtacgcgatccatgtggtcattcaatccagaaactaacattcttctcaacgtgccactccatggcactattctgaccagaccgcttctagaaagtgaactcgtaatcggagctgtgatccttcgtggacatcttcgtattgctggacaccatctaggacgctgtgacatcaaggacctgcctaaagaaatcactgttgctacatcacgaacgctttcttattacaaattgggagcttcgcagcgtgtagcaggtgactcaggttttgctgcatacagtcgctacaggattggcaactataaattaaacacagaccattccagtagcagtgacaatattgctttgcttgtacagtaagtgacaacagatgtttcatctcgttgactttcaggttactatagcagagatattactaattattatgaggacttttaaagtttccatttggaatcttgattacatcataaacctcataattaaaaatttatctaagtcactaactgagaataaatattctcaattagatgaagagcaaccaatggagattgattaaacgaacatgaaaattattcttttcttggcactgataacactcgctacttgtgagctttatcactaccaagagtgtgttagaggtacaacagtacttttaaaagaaccttgctcttctggaacatacgagggcaattcaccatttcatcctctagctgataacaaatttgcactgacttgctttagcactcaatttgcttttgcttgtcctgacggcgtaaaacacgtctatcagttacgtgccagatcagtttcacctaaactgttcatcagacaagaggaagttcaagaactttactctccaatttttcttattgttgcggcaatagtgtttataacactttgcttcacactcaaaagaaagacagaatgattgaactttcattaattgacttctatttgtgctttttagcctttctgctattccttgttttaattatgcttattatcttttggttctcacttgaactgcaagatcataatgaaacttgtcacgcctaaacgaacatgaaatttcttgttttcttaggaatcatcacaactgtagctgcatttcaccaagaatgtagtttacagtcatgtactcaacatcaaccatatgtagttgatgacccgtgtcctattcacttctattctaaatggtatattagagtaggagctagaaaatcagcacctttaattgaattgtgcgtggatgaggctggttctaaatcacccattcagtacatcgatatcggtaattatacagtttcctgtttaccttttacaattaattgccaggaacctaaattgggtagtcttgtagtgcgttgttcgttctatgaagactttttagagtatcatgacgttcgtgttgttttagatttcatctaaacgaacaaactaaaatgtctgataatggaccccaaaatcagcgaaatgcaccccgcattacgtttggtggaccctcagattcaactggcagtaaccagaatggagaacgcagtggggcgcgatcaaaacaacgtcggccccaaggtttacccaataatactgcgtcttggttcaccgctctcactcaacatggcaaggaagaccttaaattccctcgaggacaaggcgttccaattaacaccaatagcagtccagatgaccaaattggctactaccgaagagctaccagacgaattcgtggtggtgacggtaaaatgaaagatctcagtccaagatggtatttctactacctaggaactgggccagaagctggacttccctatggtgctaacaaagacggcatcatatgggttgcaactgagggagccttgaatacaccaaaagatcacattggcacccgcaatcctgctaacaatgctgcaatcgtgctacaacttcctcaaggaacaacattgccaaaaggcttctacgcagaagggagcagaggcggcagtcaagcctcttctcgttcctcatcacgtagtcgcaacagttcaagaaattcaactccaggcagcagtaggggaacttctcctgctagaatggctggcaatggcggtgatgctgctcttgctttgctgctgcttgacagattgaaccagcttgagagcaaaatgtctggtaaaggccaacaacaacaaggccaaactgtcactaagaaatctgctgctgaggcttctaagaagcctcggcaaaaacgtactgccactaaagcatacaatgtaacacaagctttcggcagacgtggtccagaacaaacccaaggaaattttggggaccaggaactaatcagacaaggaactgattacaaacattggccgcaaattgcacaatttgcccccagcgcttcagcgttcttcggaatgtcgcgcattggcatggaagtcacaccttcgggaacgtggttgacctacacaggtgccatcaaattggatgacaaagatccaaatttcaaagatcaagtcattttgctgaataagcatattgacgcatacaaaacattcccaccaacagagcctaaaaaggacaaaaagaagaaggctgatgaaactcaagccttaccgcagagacagaagaaacagcaaactgtgactcttcttcctgctgcagatttggatgatttctccaaacaattgcaacaatccatgagcagtgctgactcaactcaggcctaaactcatgcagaccacacaaggcagatgggctatataaacgttttcgcttttccgtttacgatatatagtctactcttgtgcagaatgaattctcgtaactacatagcacaagtagatgtagttaactttaatctcacatagcaatctttaatcagtgtgtaacattagggaggacttgaaagagccaccacattttcaccgaggccacgcggagtacgatcgagtgtacagtgaacaatgctagggagagctgcctatatggaagagccctaatgtgtaaaattaattttagtagtgctatccccatgtgattttaatagcttcttaggagaatgacaaaaaaaaaaaaaaaaaaaaaaaaaaaaaaaaaaaaaaaaaaaaaaaaaaaaaaaaaaagggtcggcatggcatctccacctcctcgcggtccgacctgggcatccgaaggaggacgcacgtccactcggatggctaagggagcagcacactggcggccgttactagggccgcgcccttcccaacagttgcgcagcctgaatggcgaatggagatccaatttttaagtgtataatgtgttaaactactgattctaattgtttgtgtattttagattcacagtcccaaggctcatttcaggcccctcagtcctcacagtctgttcatgatcataatcagccataccacatttgtagaggttttacttgctttaaaaaacctcccacacctccccctgaacctgaaacataaaatgaatgcaattgttgttgttaacttgtttattgcagcttataatggttacaaataaagcaatagcatcacaaatttcacaaataaagcatttttttcactgcattctagttgtggtttgtccaaactcatcaatgtatcttaaagcttgagtattctatagtctcacctaaatagcttggcgtaatcatggtcatagctgtttcctgtgtgaaattgttatccgctcacaattccacacaacatacgagccggaagcataaagtgtaaagcctggggtgcctaatgagtgagctaactcacattaattgcgttgcgctcactgcccgctttccagtcgggaaacctgtcgtgccagctgcattaatgaatcggccaacgcgaaccccttgcggccgcccgggccgtcgaccaattctcatgtttgacagcttatcatcgaatttctgccattcatccgcttattatcacttattcaggcgtagcaaccaggcgtttaagggcaccaataactgccttaaaaaaattacgccccgccctgccactcatcgcagtactgttgtaattcattaagcattctgccgacatggaagccatcacaaacggcatgatgaacctgaatcgccagcggcatcagcaccttgtcgccttgcgtataatatttgcccatggtgaaaacgggggcgaagaagttgtccatattggccacgtttaaatcaaaactggtgaaactcacccagggattggctgagacgaaaaacatattctcaataaaccctttagggaaataggccaggttttcaccgtaacacgccacatcttgcgaatatatgtgtagaaactgccggaaatcgtcgtggtattcactccagagcgatgaaaacgtttcagtttgctcatggaaaacggtgtaacaagggtgaacactatcccatatcaccagctcaccgtctttcattgccatacgaaattccggatgagcattcatcaggcgggcaagaatgtgaataaaggccggataaaacttgtgcttatttttctttacggtctttaaaaaggccgtaatatccagctgaacggtctggttataggtacattgagcaactgactgaaatgcctcaaaatgttctttacgatgccattgggatatatcaacggtggtatatccagtgatttttttctccattttagcttccttagctcctgaaaatctcgataactcaaaaaatacgcccggtagtgatcttatttcattatggtgaaagttggaacctcttacgtgccgatcaacgtctcattttcgccaaaagttggcccagggcttcccggtatcaacagggacaccaggatttatttattctgcgaagtgatcttccgtcacaggtatttattcgcgataagctcatggagcggcgtaaccgtcgcacaggaaggacagagaaagcgcggatctgggaagtgacggacagaacggtcaggacctggattggggaggcggttgccgccgctgctgctgacggtgtgacgttctctgttccggtcacaccacatacgttccgccattcctatgcgatgcacatgctgtatgccggtataccgctgaaagttctgcaaagcctgatgggacataagtccatcagttcaacggaagtctacacgaaggtttttgcgctggatgtggctgcccggcaccgggtgcagtttgcgatgccggagtctgatgcggttgcgatgctgaaacaattatcctgagaataaatgccttggcctttatatggaaatgtggaactgagtggatatgctgtttttgtctgttaaacagagaagctggctgttatccactgagaagcgaacgaaacagtcgggaaaatctcccattatcgtagagatccgcattattaatctcaggagcctgtgtagcgtttataggaagtagtgttctgtcatgatgcctgcaagcggtaacgaaaacgatttgaatatgccttcaggaacaatagaaatcttcgtgcggtgttacgttgaagtggagcggattatgtcagcaatggacagaacaacctaatgaacacagaaccatgatgtggtctgtccttttacagccagtagtgctcgccgcagtcgagcgacagggcgaagccctcggctggttgccctcgccgctgggctggcggccgtctatggccctgcaaacgcgccagaaacgccgtcgaagccgtgtgcgagacaccgcggccggccgccggcgttgtggatacctcgcggaaaacttggccctcactgacagatgaggggcggacgttgacacttgaggggccgactcacccggcgcggcgttgacagatgaggggcaggctcgatttcggccggcgacgtggagctggccagcctcgcaaatcggcgaaaacgcctgattttacgcgagtttcccacagatgatgtggacaagcctggggataagtgccctgcggtattgacacttgaggggcgcgactactgacagatgaggggcgcgatccttgacacttgaggggcagagtgctgacagatgaggggcgcacctattgacatttgaggggctgtccacaggcagaaaatccagcatttgcaagggtttccgcccgtttttcggccaccgctaacctgtcttttaacctgcttttaaaccaatatttataaaccttgtttttaaccagggctgcgccctgtgcgcgtgaccgcgcacgccgaaggggggtgcccccccttctcgaaccctcccggtcgagtgagcgaggaagcaccagggaacagcacttatatattctgcttacacacgatgcctgaaaaaacttcccttggggttatccacttatccacggggatatttttataattattttttttatagtttttagatcttcttttttagagcgccttgtaggcctttatccatgctggttctagagaaggtgttgtgacaaattgccctttcagtgtgacaaatcaccctcaaatgacagtcctgtctgtgacaaattgcccttaaccctgtgacaaattgccctcagaagaagctgttttttcacaaagttatccctgcttattgactcttttttatttagtgtgacaatctaaaaacttgtcacacttcacatggatctgtcatggcggaaacagcggttatcaatcacaagaaacgtaaaaatagcccgcgaatcgtccagtcaaacgacctcactgaggcggcatatagtctctcccgggatcaaaaacgtatgctgtatctgttcgttgaccagatcagaaaatctgatggcaccctacaggaacatgacggtatctgcgagatccatgttgctaaatatgctgaaatattcggattgacctctgcggaagccagtaaggatatacggcaggcattgaagagtttcgcggggaaggaagtggttttttatcgccctgaagaggatgccggcgatgaaaaaggctatgaatcttttccttggtttatcaaacgtgcgcacagtccatccagagggctttacagtgtacatatcaacccatatctcattcccttctttatcgggttacagaaccggtttacgcagtttcggcttagtgaaacaaaagaaatcaccaatccgtatgccatgcgtttatacgaatccctgtgtcagtatcgtaagccggatggctcaggcatcgtctctctgaaaatcgactggatcatagagcgttaccagctgcctcaaagttaccagcgtatgcctgacttccgccgccgcttcctgcaggtctgtgttaatgagatcaacagcagaactccaatgcgcctctcatacattgagaaaaagaaaggccgccagacgactcatatcgtattttccttccgcgatatcacttccatgacgacaggatagtctgagggttatctgtcacagatttgagggtggttcgtcacatttgttctgacctactgagggtaatttgtcacagttttgctgtttccttcagcctgcatggattttctcatactttttgaactgtaatttttaaggaagccaaatttgagggcagtttgtcacagttgatttccttctctttcccttcgtcatgtgacctgatatcgggggttagttcgtcatcattgatgagggttgattatcacagtttattactctgaattggctatccgcgtgtgtacctctacctggagtttttcccacggtggatatttcttcttgcgctgagcgtaagagctatctgacagaacagttcttctttgcttcctcgccagttcgctcgctatgctcggttacacggctgcggcg

SEQ ID NO: 16 - DNA, 35283 bp, Artificial Sequence
  Clone pCCI-4K-SARS-CoV-2-DWWWW. Based on SARS-CoV-2.
gatgtgctgcaaggcgattaagttgggtaacgccagggttttcccagtcacgacgttgtaaaacgacggccagtgaattgtaatacgactcactatagggcgaattctagttattaatagtaatcaattacggggtcattagttcatagcccatatatggagttccgcgttacataacttacggtaaatggcccgcctggctgaccgcccaacgacccccgcccattgacgtcaataatgacgtatgttcccatagtaacgccaatagggactttccattgacgtcaatgggtggagtatttacggtaaactgcccacttggcagtacatcaagtgtatcatatgccaagtacgccccctattgacgtcaatgacggtaaatggcccgcctggcattatgcccagtacatgaccttatgggactttcctacttggcagtacatctacgtattagtcatcgctattaccatggtgatgcggttttggcagtacatcaatgggcgtggatagcggtttgactcacggggatttccaagtctccaccccattgacgtcaatgggagtttgttttggcaccaaaatcaacgggactttccaaaatgtcgtaacaactccgccccattgacgcaaatgggcggtaggcgtgtacggtgggaggtctatataagcagagctggtttagtgaaccgtattaaaggtttataccttcccaggtaacaaaccaaccaactttcgatctcttgtagatctgttctctaaacgaactttaaaatctgtgtggctgtcactcggctgcatgcttagtgcactcacgcagtataattaataactaattactgtcgttgacaggacacgagtaactcgtctatcttctgcaggctgcttacggtttcgtccgtgttgcagccgatcatcagcacatctaggtttcgtccgggtgtgaccgaaaggtaagatggagagccttgtccctggtttcaacgagaaaacacacgtccaactcagtttgcctgttttacaggttcgcgacgtgctcgtacgtggctttggagactccgtggaggaggtcttatcagaggcacgtcaacatcttaaagatggcacttgtggcttagtagaagttgaaaaaggcgttttgcctcaacttgaacagccctatgtgttcatcaaacgttcggatgctcgaactgcacctcatggtcatgttatggttgagctggtagcagaactcgaaggcattcagtacggtcgtagtggtgagacacttggtgtccttgtccctcatgtgggcgaaataccagtggcttaccgcaaggttcttcttcgtaagaacggtaataaaggagctggtggccatagttacggcgccgatctaaagtcatttgacttaggcgacgagcttggcactgatccttatgaagattttcaagaaaactggaacactaaacatagcagtggtgttacccgtgaactcatgcgtgagcttaacggaggggcatacactcgctatgtcgataacaacttctgtggccctgatggctaccctcttgagtgcattaaagaccttctagcacgtgctggtaaagcttcatgcactttgtccgaacaactggactttattgacactaagaggggtgtatactgctgccgtgaacatgagcatgaaattgcttggtacacggaacgttctgaaaagagctatgaattgcagacaccttttgaaattaaattggcaaagaaatttgacaccttcaatggggaatgtccaaattttgtatttcccttaaattccataatcaagactattcaaccaagggttgaaaagaaaaagcttgatggctttatgggtagaattcgatctgtctatccagttgcgtcaccaaatgaatgcaaccaaatgtgcctttcaactctcatgaagtgtgatcattgtggtgaaacttcatggcagacgggcgattttgttaaagccacttgcgaattttgtggcactgagaatttgactaaagaaggtgccactacttgtggttacttaccccaaaatgctgttgttaaaatttattgtccagcatgtcacaattcagaagtaggacctgagcatagtcttgccgaataccataatgaatctggcttgaaaaccattcttcgtaagggtggtcgcactattgcctttggaggctgtgtgttctcttatgttggttgccataacaagtgtgcctattgggtcccgcgtgcgagtgcgaacataggttgtaatcatacgggtgtagtaggtgaaggttcggaaggtctaaatgataatctactagaaatactacaaaaagaaaaagtaaatataaatatagtaggtgattttaaactaaatgaagaaatagcgataatattagcgtcgttttcggcgtcgacgagtgcgtttgtagaaacggtaaaaggtttagattataaagcgtttaaacaaatagtagaatcgtgtggtaattttaaagtgacgaaaggtaaagcgaaaaaaggtgcgtggaatataggtgaacaaaaatcgatactaagtccgctatatgcgtttgcgtcggaagcggcgcgtgtagtacgttcgatattttcgcgtacgctagaaacggcgcaaaattcggtacgtgtattacaaaaagcggcgataacgatactagatggtatatcgcaatattcgctacgtctaatagatgcgatgatgtttacgtcggatttagcgacgaataatctagtagtaatggcgtatataacgggtggtgtagtacaattaacgtcgcaatggctaacgaatatatttggtacggtatatgaaaaactaaaaccggtactagattggctagaagaaaaatttaaagaaggtgtagaatttctacgtgatggttgggaaatagtaaaatttatatcgacgtgtgcgtgtgaaatagtaggtggtcaaatagtaacgtgtgcgaaagaaataaaagaatcggtacaaacgttttttaaactagtaaataaatttctagcgctatgtgcggattcgataataataggtggtgcgaaactaaaagcgctaaatctaggtgaaacgtttgtgacgcattcgaaaggtttatatcgtaaatgtgtaaaatcgcgtgaagaaacgggtctactaatgccgctaaaagcgccgaaagaaataatatttttagaaggtgaaacgctaccgacggaagtattaacggaagaagtagtattaaaaacgggtgatttacaaccgttagaacaaccgacgtcggaagcggtagaagcgccgttagtaggtacgccggtatgtataaatggtctaatgttactagaaataaaagatacggaaaaatattgtgcgctagcgccgaatatgatggtaacgaataatacgtttacgctaaaaggtggtgcgccgacgaaagtaacgtttggtgatgatacggtaatagaagtacaaggttataaatcggtaaatataacgtttgaactagatgaacgtatagataaagtactaaatgaaaaatgttcggcgtatacggtagaactaggtacggaagtaaatgaatttgcgtgtgtagtagcggatgcggtaataaaaacgttacaaccggtatcggaattactaacgccgctaggtatagatttagatgaatggtcgatggcgacgtattatttatttgatgaatcgggtgaatttaaattagcgtcgcatatgtattgttcgttttatccgccggatgaagatgaagaagaaggtgattgtgaagaagaagaatttgaaccgtcgacgcaatatgaatatggtacggaagatgattatcaaggtaaaccgttagaatttggtgcgacgtcggcggcgctacaaccggaagaagaacaagaagaagattggttggatgatgattcgcaacaaacggtaggtcaacaagatggttcggaagataatcaaacgacgacgatacaaacgatagtagaagtacaaccgcaattagaaatggaactaacgccggtagtacaaacgatagaagtaaattcgttttcgggttatttaaaactaacggataatgtatatataaaaaatgcggatatagtagaagaagcgaaaaaagtaaaaccgacggtagtagtaaatgcggcgaatgtatatctaaaacatggtggtggtgtagcgggtgcgttaaataaagcgacgaataatgcgatgcaagtagaatcggatgattatatagcgacgaatggtccgctaaaagtaggtggttcgtgtgtattatcgggtcataatctagcgaaacattgtctacatgtagtaggtccgaatgtaaataaaggtgaagatatacaactactaaaatcggcgtatgaaaattttaatcaacatgaagtactactagcgccgttattatcggcgggtatatttggtgcggacccgatacattcgttacgtgtgtgtgtagatacggtacgcacgaatgtatatttagcggtatttgataaaaatctatatgataaactagtatcgtcgtttttagaaatgaaatcggaaaaacaagtagaacaaaaaatagcggaaataccgaaagaagaagtaaaaccgtttataacggaatcgaaaccgtcggtagaacaacgtaaacaagatgataaaaaaataaaagcgtgtgtagaagaagtaacgacgacgctagaagaaacgaaatttctaacagaaaatttattactatatatagatataaatggtaatctacatccggattcggcgacgctagtatcggatatagatataacgtttttaaaaaaagatgcgccgtatatagtaggtgatgtagtacaagaaggtgtattaacggcggtagtaataccgacgaaaaaagcgggtggtacgacggaaatgctggcgaaagcgttacgtaaagtaccgacggataattatataacgacgtacccgggtcagggtttaaatggttacactgtagaggaggcaaagacagtgcttaaaaagtgtaaaagtgccttttacattctaccatctattatctctaatgagaagcaagaaattcttggaactgtttcttggaatttgcgagaaatgcttgcacatgcagaagaaacacgcaaattaatgcctgtctgtgtggaaactaaagccatagtttcaactatacagcgtaaatataagggtattaaaatacaagagggtgtggttgattatggtgctagattttacttttacaccagtaaaacaactgtagcgtcacttatcaacacacttaacgatctaaatgaaactcttgttacaatgccacttggctatgtaacacatggcttaaatttggaagaagctgctcggtatatgagatctctcaaagtgccagctacagtttctgtttcttcacctgatgctgttacagcgtataatggttatcttacttcttcttctaaaacacctgaagaacattttattgaaaccatctcacttgctggttcctataaagattggtcctattctggacaatctacacaactaggtatagaatttcttaagagaggtgataaaagtgtatattacactagtaatcctaccacattccacctagatggtgaagttatcacctttgacaatcttaagacacttctttctttgagagaagtgaggactattaaggtgtttacaacagtagacaacattaacctccacacgcaagttgtggacatgtcaatgacatatggacaacagtttggtccaacttatttggatggagctgatgttactaaaataaaacctcataattcacatgaaggtaaaacattttatgttttacctaatgatgacactctacgtgttgaggcttttgagtactaccacacaactgatcctagttttctgggtaggtacatgtcagcattaaatcacactaaaaagtggaaatacccacaagttaatggtttaacttctattaaatgggcagataacaactgttatcttgccactgcattgttaacactccaacaaatagagttgaagtttaatccacctgctctacaagatgcttattacagagcaagggctggtgaagctgctaacttttgtgcacttatcttagcctactgtaataagacagtaggtgagttaggtgatgttagagaaacaatgagttacttgtttcaacatgccaatttagattcttgcaaaagagtcttgaacgtggtgtgtaaaacttgtggacaacagcagacaacccttaagggtgtagaagctgttatgtacatgggcacactttcttatgaacaatttaagaaaggtgttcagataccttgtacgtgtggtaaacaagctacaaaatatctagtacaacaggagtcaccttttgttatgatgtcagcaccacctgctcagtatgaacttaagcatggtacatttacttgtgctagtgagtacactggtaattaccagtgtggtcactataaacatataacttctaaagaaactttgtattgcatagacggtgctttacttacaaagtcctcagaatacaaaggtcctattacggatgttttctacaaagaaaacagttacacaacaaccataaaaccagttacttataaattggatggtgttgtttgtacagaaattgaccctaagttggacaattattataagaaagacaattcttatttcacagagcaaccaattgatcttgtaccaaaccaaccatatccaaacgcaagcttcgataattttaagtttgtatgtgataatatcaaatttgctgatgatttaaaccagttaactggttataagaaacctgcttcaagagagcttaaagttacatttttccctgacttaaatggtgatgtggtggctattgattataaacactacacaccctcttttaagaaaggagctaaattgttacataaacctattgtttggcatgttaacaatgcaactaataaagccacgtataaaccaaatacctggtgtatacgttgtctttggagcacaaaaccagttgaaacatcaaattcgtttgatgtactgaagtcagaggacgcgcagggaatggataatcttgcctgcgaagatctaaaaccagtctctgaagaagtagtggaaaatcctaccatacagaaagacgttcttgagtgtaatgtgaaaactaccgaagttgtaggagacattatacttaaaccagcaaataatagtttaaaaattacagaagaggttggccacacagatctaatggctgcttatgtagacaattctagtcttactattaagaaacctaatgaattatctagagtattaggtttgaaaacccttgctactcatggtttagctgctgttaatagtgtcccttgggatactatagctaattatgctaagccttttcttaacaaagttgttagtacaactactaacatagttacacggtgtttaaaccgtgtttgtactaattatatgccttatttctttactttattgctacaattgtgtacttttactagaagtacaaattctagaattaaagcatctatgccgactactatagcaaagaatactgttaagagtgtcggtaaattttgtctagaggcttcatttaattatttgaagtcacctaatttttctaaactgataaatattataatttggtttttactattaagtgtttgcctaggttctttaatctactcaaccgctgctttaggtgttttaatgtctaatttaggcatgccttcttactgtactggttacagagaaggctatttgaactctactaatgtcactattgcaacctactgtactggttctataccttgtagtgtttgtcttagtggtttagattctttagacacctatccttctttagaaactatacaaattaccatttcatcttttaaatgggatttaactgcttttggcttagttgcagagtggtttttggcatatattcttttcactaggtttttctatgtacttggattggctgcaatcatgcaattgtttttcagctattttgcagtacattttattagtaattcttggcttatgtggttaataattaatcttgtacaaatggccccgatttcagctatggttagaatgtacatcttctttgcatcattttattatgtatggaaaagttatgtgcatgttgtagacggttgtaattcatcaacttgtatgatgtgttacaaacgtaatagagcaacaagagtcgaatgtacaactattgttaatggtgttagaaggtccttttatgtctatgctaatggaggtaaaggcttttgcaaactacacaattggaattgtgttaattgtgatacattctgtgctggtagtacatttattagtgatgaagttgcgagagacttgtcactacagtttaaaagaccaataaatcctactgaccagtcttcttacatcgttgatagtgttacagtgaagaatggttccatccatctttactttgataaagctggtcaaaagacttatgaaagacattctctctctcattttgttaacttagacaacctgagagctaataacactaaaggttcattgcctattaatgttatagtttttgatggtaaatcaaaatgtgaagaatcatctgcaaaatcagcgtctgtttactacagtcagcttatgtgtcaacctatactgttactagatcaggcattagtgtctgatgttggtgatagtgcggaagttgcagttaaaatgtttgatgcttacgttaatacgttttcatcaacttttaacgtaccaatggaaaaactcaaaacactagttgcaactgcagaagctgaacttgcaaagaatgtgtccttagacaatgtcttatctacttttatttcagcagctcggcaagggtttgttgattcagatgtagaaactaaagatgttgttgaatgtcttaaattgtcacatcaatctgacatagaagttactggcgatagttgtaataactatatgctcacctataacaaagttgaaaacatgacaccccgtgaccttggtgcttgtattgactgtagtgcgcgtcatattaatgcgcaggtagcaaaaagtcacaacattgctttgatatggaacgttaaagatttcatgtcattgtctgaacaactacgaaaacaaatacgtagtgctgctaaaaagaataacttaccttttaagttgacatgtgcaactactagacaagttgttaatgttgtaacaacaaagatagcacttaagggtggtaaaattgttaataattggttgaagcagttaattaaagttacacttgtgttcctttttgttgctgctattttctatttaataacacctgttcatgtcatgtctaaacatactgacttttcaagtgaaatcataggatacaaggctattgatggtggtgtcactcgtgacatagcatctacagatacttgttttgctaacaaacatgctgattttgacacatggtttagccagcgtggtggtagttatactaatgacaaagcttgcccattgattgctgcagtcataacaagagaagtgggttttgtcgtgcctggtttgcctggcacgatattacgcacaactaatggtgactttttgcatttcttacctagagtttttagtgcagttggtaacatctgttacacaccatcaaaacttatagagtacactgactttgcaacatcagcttgtgttttggctgctgaatgtacaatttttaaagatgcttctggtaagccagtaccatattgttatgataccaatgtactagaaggttctgttgcttatgaaagtttacgccctgacacacgttatgtgctcatggatggctctattattcaatttcctaacacctaccttgaaggttctgttagagtggtaacaacttttgattctgagtactgtaggcacggcacttgtgaaagatcagaagctggtgtttgtgtatctactagtggtagatgggtacttaacaatgattattacagatctttaccaggagttttctgtggtgtagatgctgtaaatttacttactaatatgtttacaccactaattcaacctattggtgctttggacatatcagcatctatagtagctggtggtattgtagctatcgtagtaacatgccttgcctactattttatgaggtttagaagagcttttggtgaatacagtcatgtagttgcctttaatactttactattccttatgtcattcactgtactctgtttaacaccagtttactcattcttacctggtgtttattctgttatttacttgtacttgacattttatcttactaatgatgtttcttttttagcacatattcagtggatggttatgttcacacctttagtacctttctggataacaattgcttatatcatttgtatttccacaaagcatttctattggttctttagtaattacctaaagagacgtgtagtctttaatggtgtttcctttagtacttttgaagaagctgcgctgtgcacctttttgttaaataaagaaatgtatctaaagttgcgtagtgatgtgctattacctcttacgcaatataatagatacttagctctttataataagtacaagtattttagtggagcaatggatacaactagctacagagaagctgcttgttgtcatctcgcaaaggctctcaatgacttcagtaactcaggttctgatgttctttaccaaccaccacaaacctctatcacctcagctgttttgcagagtggttttagaaaaatggcattcccatctggtaaagttgagggttgtatggtacaagtaacttgtggtacaactacacttaacggtctttggcttgatgacgtagtttactgtccaagacatgtgatctgcacctctgaagacatgcttaaccctaattatgaagatttactcattcgtaagtctaatcataatttcttggtacaggctggtaatgttcaactcagggttattggacattctatgcaaaattgtgtacttaagcttaaggttgatacagccaatcctaagacacctaagtataagtttgttcgcattcaaccaggacagactttttcagtgttagcttgttacaatggttcaccatctggtgtttaccaatgtgctatgaggcccaatttcactattaagggttcattccttaatggttcatgtggtagtgttggttttaacatagattatgactgtgtctctttttgttacatgcaccatatggaattaccaactggagttcatgctggcacagacttagaaggtaacttttatggaccttttgttgacaggcaaacagcacaagcagctggtacggacacaactattacagttaatgttttagcttggttgtacgctgctgttataaatggagacaggtggtttctcaatcgatttaccacaactcttaatgactttaaccttgtggctatgaagtacaattatgaacctctaacacaagaccatgttgacatactaggacctctttctgctcaaactggaattgccgttttagatatgtgtgcttcattaaaagaattactgcaaaatggtatgaatggacgtaccatattgggtagtgctttattagaagatgaatttacaccttttgatgttgttagacaatgctcaggtgttactttccaaagtgcagtgaaaagaacaatcaagggtacacaccactggttgttactcacaattttgacttcacttttagttttagtccagagtactcaatggtctttgttcttttttttgtatgaaaatgcctttttaccttttgctatgggtattattgctatgtctgcttttgcaatgatgtttgtcaaacataagcatgcatttctctgtttgtttttgttaccttctcttgccactgtagcttattttaatatggtctatatgcctgctagttgggtgatgcgtattatgacatggttggatatggttgatactagtttgtctggttttaagctaaaagactgtgttatgtatgcatcagctgtagtgttactaatccttatgacagcaagaactgtgtatgatgatggtgctaggagagtgtggacacttatgaatgtcttgacactcgtttataaagtttattatggtaatgctttagatcaagccatttccatgtgggctcttataatctctgttacttctaactactcaggtgtagttacaactgtcatgtttttggccagaggtattgtttttatgtgtgttgagtattgccctattttcttcataactggtaatacacttcagtgtataatgctagtttattgtttcttaggctatttttgtacttgttactttggcctcttttgtttactcaaccgctactttagactgactcttggtgtttatgattacttagtttctacacaggagtttagatatatgaattcacagggactactcccacccaagaatagcatagatgccttcaaactcaacattaaattgttgggtgttggtggcaaaccttgtatcaaagtagccactgtacagtctaaaatgtcagatgtaaagtgcacatcagtagtcttactctcagttttgcaacaactcagagtagaatcatcatctaaattgtgggctcaatgtgtccagttacacaatgacattctcttagctaaagatactactgaagcctttgaaaaaatggtttcactactttctgttttgctttccatgcagggtgctgtagacataaacaagctttgtgaagaaatgctggacaacagggcaaccttacaagctatagcctcagagtttagttcccttccatcatatgcagcttttgctactgctcaagaagcttatgagcaggctgttgctaatggtgattctgaagttgttcttaaaaagttgaagaagtctttgaatgtggctaaatctgaatttgaccgtgatgcagccatgcaacgtaagttggaaaagatggctgatcaagctatgacccaaatgtataaacaggctagatctgaggacaagagggcaaaagttactagtgctatgcagacaatgcttttcactatgcttagaaagttggataatgatgcactcaacaacattatcaacaatgcaagagatggttgtgttcccttgaacataatacctcttacaacagcagccaaactaatggttgtcataccagactataacacatataaaaatacgtgtgatggtacaacatttacttatgcatcagcattgtgggaaatccaacaggttgtagatgcagatagtaaaattgttcaacttagtgaaattagtatggacaattcacctaatttagcatggcctcttattgtaacagctttaagggccaattctgctgtcaaattacagaataatgagcttagtcctgttgcactacgacagatgtcttgtgctgccggtactacacaaactgcttgcactgatgacaatgcgttagcttactacaacacaacaaagggaggtaggtttgtacttgcactgttatccgatttacaggatttgaaatgggctagattccctaagagtgatggaactggtactatctatacagaactggaaccaccttgtaggtttgttacagacacacctaaaggtcctaaagtgaagtatttatactttattaaaggattaaacaacctaaatagaggtatggtacttggtagtttagctgccacagtacgtctacaagctggtaatgcaacagaagtgcctgccaattcaactgtattatctttctgtgcttttgctgtagatgctgctaaagcttacaaagattatctagctagtgggggacaaccaatcactaattgtgttaagatgttgtgtacacacactggtactggtcaggcaataacagttacaccggaagccaatatggatcaagaatcctttggtggtgcatcgtgttgtctgtactgccgttgccacatagatcatccaaatcctaaaggattttgtgacttaaaaggtaagtatgtacaaatacctacaacttgtgctaatgaccctgtgggttttacacttaaaaacacagtctgtaccgtctgcggtatgtggaaaggttatggctgtagttgtgatcaactccgcgaacccatgcttcagtcagctgatgcacaatcgtttttaaacgggtttgcggtgtaagtgcagcccgtcttacaccgtgcggcacaggcactagtactgatgtcgtatacagggcttttgacatctacaatgataaagtagctggttttgctaaattcctaaaaactaattgttgtcgcttccaagaaaaggacgaagatgacaatttaattgattcttactttgtagttaagagacacactttctctaactaccaacatgaagaaacaatttataatttacttaaggattgtccagctgttgctaaacatgacttctttaagtttagaatagacggtgacatggtaccacatatatcacgtcaacgtcttactaaatacacaatggcagacctcgtctatgctttaaggcattttgatgaaggtaattgtgacacattaaaagaaatacttgtcacatacaattgttgtgatgatgattatttcaataaaaaggactggtatgattttgtagaaaacccagatatattacgcgtatacgccaacttaggtgaacgtgtacgccaagctttgttaaaaacagtacaattctgtgatgccatgcgaaatgctggtattgttggtgtactgacattagataatcaagatctcaatggtaactggtatgatttcggtgatttcatacaaaccacgccaggtagtggagttcctgttgtagattcttattattcattgttaatgcctatattaaccttgaccagggctttaactgcagagtcacatgttgacactgacttaacaaagccttacattaagtgggatttgttaaaatatgacttcacggaagagaggttaaaactctttgaccgttattttaaatattgggatcagacataccacccaaattgtgttaactgtttggatgacagatgcattctgcattgtgcaaactttaatgttttattctctacagtgttcccacctacaagttttggaccactagtgagaaaaatatttgttgatggtgttccatttgtagtttcaactggataccacttcagagagctaggtgttgtacataatcaggatgtaaacttacatagctctagacttagttttaaggaattacttgtgtatgctgctgaccctgctatgcacgctgcttctggtaatctattactagataaacgcactacgtgcttttcagtagctgcacttactaacaatgttgcttttcaaactgtcaaacccggtaattttaacaaagacttctatgactttgctgtgtctaagggtttctttaaggaaggaagttctgttgaattaaaacacttcttctttgctcaggatggtaatgctgctatcagcgattatgactactatcgttataatctaccaacaatgtgtgatatcagacaactactatttgtagttgaagttgttgataagtactttgattgttacgatggtggctgtattaatgctaaccaagtcatcgtcaacaacctagacaaatcagctggttttccatttaataaatggggtaaggctagactttattatgattcaatgagttatgaggatcaagatgcacttttcgcatatacaaaacgtaatgtcatccctactataactcaaatgaatcttaagtatgccattagtgcaaagaatagagctcgcaccgtagctggtgtctctatctgtagtactatgaccaatagacagtttcatcaaaaattattgaaatcaatagccgccactagaggagctactgtagtaattggaacaagcaaattctatggtggttggcacaacatgttaaaaactgtttatagtgatgtagaaaaccctcaccttatgggttgggattatcctaaatgtgatagagccatgcctaacatgcttagaattatggcctcacttgttcttgctcgcaaacatacaacgtgttgtagcttgtcacaccgtttctatagattagctaatgagtgtgctcaagtattgagtgaaatggtcatgtgtggcggttcactatatgttaaaccaggtggaacctcatcaggagatgccacaactgcttatgctaatagtgtttttaacatttgtcaagctgtcacggccaatgttaatgcacttttatctactgatggtaacaaaattgccgataagtatgtccgcaatttacaacacagactttatgagtgtctctatagaaatagagatgttgacacagactttgtgaatgagttttacgcatatttgcgtaaacatttctcaatgatgatactctctgacgatgctgttgtgtgtttcaatagcacttatgcatctcaaggtctagtggctagcataaagaactttaagtcagttctttattatcaaaacaatgtttttatgtctgaagcaaaatgttggactgagactgaccttactaaaggacctcatgaattttgctctcaacatacaatgctagttaaacagggtgatgattatgtgtaccttccttacccagatccatcaagaatcctaggggccggctgttttgtagatgatatcgtaaaaacagatggtacacttatgattgaacggttcgtgtctttagctatagatgcttacccacttactaaacatcctaatcaggagtatgctgatgtctttcatttgtacttacaatacataagaaagctacatgatgagttaacaggacacatgttagacatgtattctgttatgcttactaatgataacacttcaaggtattgggaacctgagttttatgaggctatgtacacaccgcatacagtcttacaggctgttggggcttgtgttctttgcaattcacagacttcattaagatgtggtgcttgcatacgtagaccattcttatgttgtaaatgctgttacgaccatgtcatatcaacatcacataaattagtcttgtctgttaatccgtatgtttgcaatgctccaggttgtgatgtcacagatgtgactcaactttacttaggaggtatgagctattattgtaaatcacataaaccacccattagttttccattgtgtgctaatggacaagtttttggtttatataaaaatacatgtgttggtagcgataatgttactgactttaatgcaattgcaacatgtgactggacaaatgctggtgattacattttagctaacacctgtactgaaagactcaagctttttgcagcagaaacgctcaaagctactgaggagacatttaaactgtcttatggtattgctactgtacgtgaagtgctgtctgacagagaattacatctttcatgggaagttggtaaacctagaccaccacttaaccgaaattatgtctttactggttatcgtgtaactaaaaacagtaaagtacaaataggagagtacacctttgaaaaaggtgactatggtgatgctgttgtttaccgaggtacaacaacttacaaattaaatgttggtgattattttgtgctgacatcacatacagtaatgccattaagtgcacctacactagtgccacaagagcactatgttagaattactggcttatacccaacactcaatatctcagatgagttttctagcaatgttgcaaattatcaaaaggttggtatgcaaaagtattctacactccagggaccacctggtactggtaagagtcattttgctattggcctagctctctactacccttctgctcgcatagtgtatacagcttgctctcatgccgctgttgatgcactatgtgagaaggcattaaaatatttgcctatagataaatgtagtagaattatacctgcacgtgctcgtgtagagtgttttgataaattcaaagtgaattcaacattagaacagtatgtcttttgtactgtaaatgcattgcctgagacgacagcagatatagttgtctttgatgaaatttcaatggccacaaattatgatttgagtgttgtcaatgccagattacgtgctaagcactatgtgtacattggcgaccctgctcaattacctgcaccacgcacattgctaactaagggcacactagaaccagaatatttcaattcagtgtgtagacttatgaaaactataggtccagacatgttcctcggaacttgtcggcgttgtcctgctgaaattgttgacactgtgagtgctttggtttatgataataagcttaaagcacataaagacaaatcagctcaatgctttaaaatgttttataagggtgttatcacgcatgatgtttcatctgcaattaacaggccacaaataggcgtggtaagagaattccttacacgtaaccctgcttggagaaaagctgtctttatttcaccttataattcacagaatgctgtagcctcaaagattttgggactaccaactcaaactgttgattcatcacagggctcagaatatgactatgtcatattcactcaaaccactgaaacagctcactcttgtaatgtaaacagatttaatgttgctattaccagagcaaaagtaggcatactttgcataatgtctgatagagacctttatgacaagttgcaatttacaagtcttgaaattccacgtaggaatgtggcaactttacaagctgaaaatgtaacaggactctttaaagattgtagtaaggtaatcactgggttacatcctacacaggcacctacacacctcagtgttgacactaaattcaaaactgaaggtttatgtgttgacatacctggcatacctaaggacatgacctatagaagactcatctctatgatgggttttaaaatgaattatcaagttaatggttaccctaacatgtttatcacccgcgaagaagctataagacatgtacgtgcatggattggcttcgatgtcgaggggtgtcatgctactagagaagctgttggtaccaatttacctttacagctaggtttttctacaggtgttaacctagttgctgtacctacaggttatgttgatacacctaataatacagatttttccagagttagtgctaaaccaccgcctggagatcaatttaaacacctcataccacttatgtacaaaggacttccttggaatgtagtgcgtataaagattgtacaaatgttaagtgacacacttaaaaatctctctgacagagtcgtatttgtcttatgggcacatggctttgagttgacatctatgaagtattttgtgaaaataggacctgagcgcacctgttgtctatgtgatagacgtgccacatgcttttccactgcttcagacacttatgcctgttggcatcattctattggatttgattacgtctataatccgtttatgattgatgttcaacaatggggttttacaggtaacctacaaagcaaccatgatctgtattgtcaagtccatggtaatgcacatgtagctagttgtgatgcaatcatgactaggtgtctagctgtccacgagtgctttgttaagcgtgttgactggactattgaatatcctataattggtgatgaactgaagattaatgcggcttgtagaaaggttcaacacatggttgttaaagctgcattattagcagacaaattcccagttcttcacgacattggtaaccctaaagctattaagtgtgtacctcaagctgatgtagaatggaagttctatgatgcacagccttgtagtgacaaagcttataaaatagaagaattattctattcttatgccacacattctgacaaattcacagatggtgtatgcctattttggaattgcaatgtcgatagatatcctgctaattccattgtttgtagatttgacactagagtgctatctaaccttaacttgcctggttgtgatggtggcagtttgtatgtaaataaacatgcattccacacaccagcttttgataaaagtgcttttgttaatttaaaacaattaccatttttctattactctgacagtccatgtgagtctcatggaaaacaagtagtgtcagatatagattatgtaccactaaagtctgctacgtgtataacacgttgcaatttaggtggtgctgtctgtagacatcatgctaatgagtacagattgtatctcgatgcttataacatgatgatctcagctggctttagcttgtgggtttacaaacaatttgatacttataacctctggaacacttttacaagacttcagagtttagaaaatgtggcttttaatgttgtaaataagggacactttgatggacaacagggtgaagtaccagtttctatcattaataacactgtttacacaaaagttgatggtgttgatgtagaattgtttgaaaataaaacaacattacctgttaatgtagcatttgagctttgggctaagcgcaacattaaaccagtaccagaggtgaaaatactcaataatttgggtgtggacattgctgctaatactgtgatctgggactacaaaagagatgctccagcacatatatctactattggtgtttgttctatgactgacatagccaagaaaccaactgaaacgatttgtgcaccactcactgtcttttttgatggtagagttgatggtcaagtagacttatttagaaatgcccgtaatggtgttcttattacagaaggtagtgttaaaggtttacaaccatctgtaggtcccaaacaagctagtcttaatggagtcacattaattggagaagccgtaaaaacacagttcaattattataagaaagttgatggtgttgtccaacaattacctgaaacttactttactcagagtagaaatttacaagaatttaaacccaggagtcaaatggaaattgatttcttagaattagctatggatgaattcattgaacggtataaattagaaggctatgccttcgaacatatcgtttatggagattttagtcatagtcagttaggtggtttacatctactgattggactagctaaacgttttaaggaatcaccttttgaattagaagattttattcctatggacagtacagttaaaaactatttcataacagatgcgcaaacaggttcatctaagtgtgtgtgttctgttattgatttattacttgatgattttgttgaaataataaaatcccaagatttatctgtagtttctaaggttgtcaaagtgactattgactatacagaaatttcatttatgctttggtgtaaagatggccatgtagaaacattttacccaaaattacaatctagtcaagcgtggcaaccgggtgttgctatgcctaatctttacaaaatgcaaagaatgctattagaaaagtgtgaccttcaaaattatggtgatagtgcaacattacctaaaggcataatgatgaatgtcgcaaaatatactcaactgtgtcaatatttaaacacattaacattagctgtaccctataatatgagagttatacattttggtgctggttctgataaaggagttgcaccaggtacagctgttttaagacagtggttgcctacgggtacgctgcttgtcgattcagatcttaatgactttgtctctgatgcagattcaactttgattggtgattgtgcaactgtacatacagctaataaatgggatctcattattagtgatatgtacgaccctaagactaaaaatgttacaaaagaaaatgactctaaagagggttttttcacttacatttgtgggtttatacaacaaaagctagctcttggaggttccgtggctataaagataacagaacattcttggaatgctgatctttataagctcatgggacacttcgcatggtggacagcctttgttactaatgtgaatgcgtcatcatctgaagcatttttaattggatgtaattatcttggcaaaccacgcgaacaaatagatggttatgtcatgcatgcaaattacatattttggaggaatacaaatccaattcagttgtcttcctattctttatttgacatgagtaaatttccccttaaattaaggggtactgctgttatgtctttaaaagaaggtcaaatcaatgatatgattttatctcttcttagtaaaggtagacttataattagagaaaacaacagagttgttatttctagtgatgttcttgttaacaactaaacgaacaatgtttgtttttcttgttttattgccactagtctctagtcagtgtgttaatcttacaaccagaactcaattaccccctgcatacactaattctttcacacgtggtgtttattaccctgacaaagttttcagatcctcagttttacattcaactcaggacttgttcttacctttcttttccaatgttacttggttccatgctatacatgtctctgggaccaatggtactaagaggtttgataaccctgtcctaccatttaatgatggtgtttattttgcttccactgagaagtctaacataataagaggctggatttttggtactactttagattcgaagacccagtccctacttattgttaataacgctactaatgttgttattaaagtctgtgaatttcaattttgtaatgatccatttttgggtgtttattaccacaaaaacaacaaaagttggatggaaagtgagttcagagtttattctagtgcgaataattgcacttttgaatatgtctctcagccttttcttatggaccttgaaggaaaacagggtaatttcaaaaatcttagggaatttgtgtttaagaatattgatggttattttaaaatatattctaagcacacgcctattaatttagtgcgtgatctcccccagggtttttcggctttagaaccattggtagatttgccaataggtattaacatcactaggtttcaaactttacttgctttacatagaagttatttgactcctggtgattcttcttcaggttggacagctggtgctgcagcttattatgtgggttatcttcaacctaggacttttctattaaaatataatgaaaatggaaccattacagatgctgtagactgtgcacttgaccctctctcagaaacaaagtgtacgttgaaatccttcactgtagaaaaaggaatctatcaaacttctaactttagagtccaaccaacagaatctattgttagatttcctaatattacaaacttgtgcccttttggtgaagtttttaacgccaccagatttgcatctgtttatgcttggaacaggaagagaatcagcaactgtgttgctgattattctgtcctatataattccgcatcattttccacttttaagtgttatggagtgtctcctactaaattaaatgatctctgctttactaatgtctatgcagattcatttgtaattagaggtgatgaagtcagacaaatcgctccagggcaaactggaaagattgctgattataattataaattaccagatgattttacaggctgcgttatagcttggaattctaacaatcttgattctaaggttggtggtaattataattacctgtatagattgtttaggaagtctaatctcaaaccttttgagagagatatttcaactgaaatctatcaggccggtagcacaccttgtaatggtgttgaaggttttaattgttactttcctttacaatcatatggtttccaacccactaatggtgttggttaccaaccatacagagtagtagtactttcttttgaacttctacatgcaccagcaactgtttgtggacctaaaaagtctactaatttggttaaaaacaaatgtgtcaatttcaacttcaatggtttaacaggcacaggtgttcttactgagtctaacaaaaagtttctgcctttccaacaatttggcagagacattgctgacactactgatgctgtccgtgatccacagacacttgagattcttgacattacaccatgttcttttggtggtgtcagtgttataacaccaggaacaaatacttctaaccaggttgctgttctttatcaggatgttaactgcacagaagtccctgttgctattcatgcagatcaacttactcctacttggcgtgtttattctacaggttctaatgtttttcaaacacgtgcaggctgtttaataggggctgaacatgtcaacaactcatatgagtgtgacatacccattggtgcaggtatatgcgctagttatcagactcagactaattctcctcggcgggcacgtagtgtagctagtcaatccatcattgcctacactatgtcacttggtgcagaaaattcagttgcttactctaataactctattgccatacccacaaattttactattagtgttaccacagaaattctaccagtgtctatgaccaagacatcagtagattgtacaatgtacatttgtggtgattcaactgaatgcagcaatcttttgttgcaatatggcagtttttgtacacaattaaaccgtgctttaactggaatagctgttgaacaagacaaaaacacccaagaagtttttgcacaagtcaaacaaatttacaaaacaccaccaattaaagattttggtggttttaatttttcacaaatattaccagatccatcaaaaccaagcaagaggtcatttattgaagatctacttttcaacaaagtgacacttgcagatgctggcttcatcaaacaatatggtgattgccttggtgatattgctgctagagacctcatttgtgcacaaaagtttaacggccttactgttttgccacctttgctcacagatgaaatgattgctcaatacacttctgcactgttagcgggtacaatcacttctggttggacctttggtgcaggtgctgcattacaaataccatttgctatgcaaatggcttataggtttaatggtattggagttacacagaatgttctctatgagaaccaaaaattgattgccaaccaatttaatagtgctattggcaaaattcaagactcactttcttccacagcaagtgcacttggaaaacttcaagatgtggtcaaccaaaatgcacaagctttaaacacgcttgttaaacaacttagctccaattttggtgcaatttcaagtgttttaaatgatatcctttcacgtcttgacaaagttgaggctgaagtgcaaattgataggttgatcacaggcagacttcaaagtttgcagacatatgtgactcaacaattaattagagctgcagaaatcagagcttctgctaatcttgctgctactaaaatgtcagagtgtgtacttggacaatcaaaaagagttgatttttgtggaaagggctatcatcttatgtccttccctcagtcagcacctcatggtgtagtcttcttgcatgtgacttatgtccctgcacaagaaaagaacttcacaactgctcctgccatttgtcatgatggaaaagcacactttcctcgtgaaggtgtctttgtttcaaatggcacacactggtttgtaacacaaaggaatttttatgaaccacaaatcattactacagacaacacatttgtgtctggtaactgtgatgttgtaataggaattgtcaacaacacagtttatgatcctttgcaacctgaattagactcattcaaggaggagttagataaatattttaagaatcatacatcaccagatgttgatttaggtgacatctctggcattaatgcttcagttgtaaacattcaaaaagaaattgaccgcctcaatgaggttgccaagaatttaaatgaatctctcatcgatctccaagaacttggaaagtatgagcagtatataaaatggccatggtacatttggctaggttttatagctggcttgattgccatagtaatggtgacaattatgctttgctgtatgaccagttgctgtagttgtctcaagggctgttgttcttgtggatcctgctgcaaatttgatgaagacgactctgagccagtgctcaaaggagtcaaattacattacacataaacgaacttatggatttgtttatgagaatcttcacaattggaactgtaactttgaagcaaggtgaaatcaaggatgctactccttcagattttgttcgcgctactgcaacgataccgatacaagcctcactccctttcggatggcttattgttggcgttgcacttcttgctgtttttcagagcgcttccaaaatcataaccctcaaaaagagatggcaactagcactctccaagggtgttcactttgtttgcaacttgctgttgttgtttgtaacagtttactcacaccttttgctcgttgctgctggccttgaagccccttttctctatctttatgctttagtctacttcttgcagagtataaactttgtaagaataataatgaggctttggctttgctggaaatgccgttccaaaaacccattactttatgatgccaactattttctttgctggcatactaattgttacgactattgtataccttacaatagtgtaacttcttcaattgtcattacttcaggtgatggcacaacaagtcctatttctgaacatgactaccagattggtggttatactgaaaaatgggaatctggagtaaaagactgtgttgtattacacagttacttcacttcagactattaccagctgtactcaactcaattgagtacagacactggtgttgaacatgttaccttcttcatctacaataaaattgttgatgagcctgaagaacatgtccaaattcacacaatcgacggttcatccggagttgttaatccagtaatggaaccaatttatgatgaaccgacgacgactactagcgtgcctttgtaagcacaagctgatgagtacgaacttatgtactcattcgtttcggaagagacaggtacgttaatagttaatagcgtacttctttttcttgctttcgtggtattcttgctagttacactagccatccttactgcgcttcgattgtgtgcgtactgctgcaatattgttaacgtgagtcttgtaaaaccttctttttacgtttactctcgtgttaaaaatctgaattcttctagagttcctgatcttctggtctaaacgaactaaatattatattagtttttctgtttggaactttaattttagccatggcagattccaacggtactattaccgttgaagagcttaaaaagctccttgaacaatggaacctagtaataggtttcctattccttacatggatttgtcttctacaatttgcctatgccaacaggaataggtttttgtatataattaagttaattttcctctggctgttatggccagtaactttagcttgttttgtgcttgctgctgtttacagaataaattggatcaccggtggaattgctatcgcaatggcttgtcttgtaggcttgatgtggctcagctacttcattgcttctttcagactgtttgcgcgtacgcgatccatgtggtcattcaatccagaaactaacattcttctcaacgtgccactccatggcactattctgaccagaccgcttctagaaagtgaactcgtaatcggagctgtgatccttcgtggacatcttcgtattgctggacaccatctaggacgctgtgacatcaaggacctgcctaaagaaatcactgttgctacatcacgaacgctttcttattacaaattgggagcttcgcagcgtgtagcaggtgactcaggttttgctgcatacagtcgctacaggattggcaactataaattaaacacagaccattccagtagcagtgacaatattgctttgcttgtacagtaagtgacaacagatgtttcatctcgttgactttcaggttactatagcagagatattactaattattatgaggacttttaaagtttccatttggaatcttgattacatcataaacctcataattaaaaatttatctaagtcactaactgagaataaatattctcaattagatgaagagcaaccaatggagattgattaaacgaacatgaaaattattcttttcttggcactgataacactcgctacttgtgagctttatcactaccaagagtgtgttagaggtacaacagtacttttaaaagaaccttgctcttctggaacatacgagggcaattcaccatttcatcctctagctgataacaaatttgcactgacttgctttagcactcaatttgcttttgcttgtcctgacggcgtaaaacacgtctatcagttacgtgccagatcagtttcacctaaactgttcatcagacaagaggaagttcaagaactttactctccaatttttcttattgttgcggcaatagtgtttataacactttgcttcacactcaaaagaaagacagaatgattgaactttcattaattgacttctatttgtgctttttagcctttctgctattccttgttttaattatgcttattatcttttggttctcacttgaactgcaagatcataatgaaacttgtcacgcctaaacgaacatgaaatttcttgttttcttaggaatcatcacaactgtagctgcatttcaccaagaatgtagtttacagtcatgtactcaacatcaaccatatgtagttgatgacccgtgtcctattcacttctattctaaatggtatattagagtaggagctagaaaatcagcacctttaattgaattgtgcgtggatgaggctggttctaaatcacccattcagtacatcgatatcggtaattatacagtttcctgtttaccttttacaattaattgccaggaacctaaattgggtagtcttgtagtgcgttgttcgttctatgaagactttttagagtatcatgacgttcgtgttgttttagatttcatctaaacgaacaaactaaaatgtctgataatggaccccaaaatcagcgaaatgcaccccgcattacgtttggtggaccctcagattcaactggcagtaaccagaatggagaacgcagtggggcgcgatcaaaacaacgtcggccccaaggtttacccaataatactgcgtcttggttcaccgctctcactcaacatggcaaggaagaccttaaattccctcgaggacaaggcgttccaattaacaccaatagcagtccagatgaccaaattggctactaccgaagagctaccagacgaattcgtggtggtgacggtaaaatgaaagatctcagtccaagatggtatttctactacctaggaactgggccagaagctggacttccctatggtgctaacaaagacggcatcatatgggttgcaactgagggagccttgaatacaccaaaagatcacattggcacccgcaatcctgctaacaatgctgcaatcgtgctacaacttcctcaaggaacaacattgccaaaaggcttctacgcagaagggagcagaggcggcagtcaagcctcttctcgttcctcatcacgtagtcgcaacagttcaagaaattcaactccaggcagcagtaggggaacttctcctgctagaatggctggcaatggcggtgatgctgctcttgctttgctgctgcttgacagattgaaccagcttgagagcaaaatgtctggtaaaggccaacaacaacaaggccaaactgtcactaagaaatctgctgctgaggcttctaagaagcctcggcaaaaacgtactgccactaaagcatacaatgtaacacaagctttcggcagacgtggtccagaacaaacccaaggaaattttggggaccaggaactaatcagacaaggaactgattacaaacattggccgcaaattgcacaatttgcccccagcgcttcagcgttcttcggaatgtcgcgcattggcatggaagtcacaccttcgggaacgtggttgacctacacaggtgccatcaaattggatgacaaagatccaaatttcaaagatcaagtcattttgctgaataagcatattgacgcatacaaaacattcccaccaacagagcctaaaaaggacaaaaagaagaaggctgatgaaactcaagccttaccgcagagacagaagaaacagcaaactgtgactcttcttcctgctgcagatttggatgatttctccaaacaattgcaacaatccatgagcagtgctgactcaactcaggcctaaactcatgcagaccacacaaggcagatgggctatataaacgttttcgcttttccgtttacgatatatagtctactcttgtgcagaatgaattctcgtaactacatagcacaagtagatgtagttaactttaatctcacatagcaatctttaatcagtgtgtaacattagggaggacttgaaagagccaccacattttcaccgaggccacgcggagtacgatcgagtgtacagtgaacaatgctagggagagctgcctatatggaagagccctaatgtgtaaaattaattttagtagtgctatccccatgtgattttaatagcttcttaggagaatgacaaaaaaaaaaaaaaaaaaaaaaaaaaaaaaaaaaaaaaaaaaaaaaaaaaaaaaaaaaagggtcggcatggcatctccacctcctcgcggtccgacctgggcatccgaaggaggacgcacgtccactcggatggctaagggagcagcacactggcggccgttactagggccgcgcccttcccaacagttgcgcagcctgaatggcgaatggagatccaatttttaagtgtataatgtgttaaactactgattctaattgtttgtgtattttagattcacagtcccaaggctcatttcaggcccctcagtcctcacagtctgttcatgatcataatcagccataccacatttgtagaggttttacttgctttaaaaaacctcccacacctccccctgaacctgaaacataaaatgaatgcaattgttgttgttaacttgtttattgcagcttataatggttacaaataaagcaatagcatcacaaatttcacaaataaagcatttttttcactgcattctagttgtggtttgtccaaactcatcaatgtatcttaaagcttgagtattctatagtctcacctaaatagcttggcgtaatcatggtcatagctgtttcctgtgtgaaattgttatccgctcacaattccacacaacatacgagccggaagcataaagtgtaaagcctggggtgcctaatgagtgagctaactcacattaattgcgttgcgctcactgcccgctttccagtcgggaaacctgtcgtgccagctgcattaatgaatcggccaacgcgaaccccttgcggccgcccgggccgtcgaccaattctcatgtttgacagcttatcatcgaatttctgccattcatccgcttattatcacttattcaggcgtagcaaccaggcgtttaagggcaccaataactgccttaaaaaaattacgccccgccctgccactcatcgcagtactgttgtaattcattaagcattctgccgacatggaagccatcacaaacggcatgatgaacctgaatcgccagcggcatcagcaccttgtcgccttgcgtataatatttgcccatggtgaaaacgggggcgaagaagttgtccatattggccacgtttaaatcaaaactggtgaaactcacccagggattggctgagacgaaaaacatattctcaataaaccctttagggaaataggccaggttttcaccgtaacacgccacatcttgcgaatatatgtgtagaaactgccggaaatcgtcgtggtattcactccagagcgatgaaaacgtttcagtttgctcatggaaaacggtgtaacaagggtgaacactatcccatatcaccagctcaccgtctttcattgccatacgaaattccggatgagcattcatcaggcgggcaagaatgtgaataaaggccggataaaacttgtgcttatttttctttacggtctttaaaaaggccgtaatatccagctgaacggtctggttataggtacattgagcaactgactgaaatgcctcaaaatgttctttacgatgccattgggatatatcaacggtggtatatccagtgatttttttctccattttagcttccttagctcctgaaaatctcgataactcaaaaaatacgcccggtagtgatcttatttcattatggtgaaagttggaacctcttacgtgccgatcaacgtctcattttcgccaaaagttggcccagggcttcccggtatcaacagggacaccaggatttatttattctgcgaagtgatcttccgtcacaggtatttattcgcgataagctcatggagcggcgtaaccgtcgcacaggaaggacagagaaagcgcggatctgggaagtgacggacagaacggtcaggacctggattggggaggcggttgccgccgctgctgctgacggtgtgacgttctctgttccggtcacaccacatacgttccgccattcctatgcgatgcacatgctgtatgccggtataccgctgaaagttctgcaaagcctgatgggacataagtccatcagttcaacggaagtctacacgaaggtttttgcgctggatgtggctgcccggcaccgggtgcagtttgcgatgccggagtctgatgcggttgcgatgctgaaacaattatcctgagaataaatgccttggcctttatatggaaatgtggaactgagtggatatgctgtttttgtctgttaaacagagaagctggctgttatccactgagaagcgaacgaaacagtcgggaaaatctcccattatcgtagagatccgcattattaatctcaggagcctgtgtagcgtttataggaagtagtgttctgtcatgatgcctgcaagcggtaacgaaaacgatttgaatatgccttcaggaacaatagaaatcttcgtgcggtgttacgttgaagtggagcggattatgtcagcaatggacagaacaacctaatgaacacagaaccatgatgtggtctgtccttttacagccagtagtgctcgccgcagtcgagcgacagggcgaagccctcggctggttgccctcgccgctgggctggcggccgtctatggccctgcaaacgcgccagaaacgccgtcgaagccgtgtgcgagacaccgcggccggccgccggcgttgtggatacctcgcggaaaacttggccctcactgacagatgaggggcggacgttgacacttgaggggccgactcacccggcgcggcgttgacagatgaggggcaggctcgatttcggccggcgacgtggagctggccagcctcgcaaatcggcgaaaacgcctgattttacgcgagtttcccacagatgatgtggacaagcctggggataagtgccctgcggtattgacacttgaggggcgcgactactgacagatgaggggcgcgatccttgacacttgaggggcagagtgctgacagatgaggggcgcacctattgacatttgaggggctgtccacaggcagaaaatccagcatttgcaagggtttccgcccgtttttcggccaccgctaacctgtcttttaacctgcttttaaaccaatatttataaaccttgtttttaaccagggctgcgccctgtgcgcgtgaccgcgcacgccgaaggggggtgcccccccttctcgaaccctcccggtcgagtgagcgaggaagcaccagggaacagcacttatatattctgcttacacacgatgcctgaaaaaacttcccttggggttatccacttatccacggggatatttttataattattttttttatagtttttagatcttcttttttagagcgccttgtaggcctttatccatgctggttctagagaaggtgttgtgacaaattgccctttcagtgtgacaaatcaccctcaaatgacagtcctgtctgtgacaaattgcccttaaccctgtgacaaattgccctcagaagaagctgttttttcacaaagttatccctgcttattgactcttttttatttagtgtgacaatctaaaaacttgtcacacttcacatggatctgtcatggcggaaacagcggttatcaatcacaagaaacgtaaaaatagcccgcgaatcgtccagtcaaacgacctcactgaggcggcatatagtctctcccgggatcaaaaacgtatgctgtatctgttcgttgaccagatcagaaaatctgatggcaccctacaggaacatgacggtatctgcgagatccatgttgctaaatatgctgaaatattcggattgacctctgcggaagccagtaaggatatacggcaggcattgaagagtttcgcggggaaggaagtggttttttatcgccctgaagaggatgccggcgatgaaaaaggctatgaatcttttccttggtttatcaaacgtgcgcacagtccatccagagggctttacagtgtacatatcaacccatatctcattcccttctttatcgggttacagaaccggtttacgcagtttcggcttagtgaaacaaaagaaatcaccaatccgtatgccatgcgtttatacgaatccctgtgtcagtatcgtaagccggatggctcaggcatcgtctctctgaaaatcgactggatcatagagcgttaccagctgcctcaaagttaccagcgtatgcctgacttccgccgccgcttcctgcaggtctgtgttaatgagatcaacagcagaactccaatgcgcctctcatacattgagaaaaagaaaggccgccagacgactcatatcgtattttccttccgcgatatcacttccatgacgacaggatagtctgagggttatctgtcacagatttgagggtggttcgtcacatttgttctgacctactgagggtaatttgtcacagttttgctgtttccttcagcctgcatggattttctcatactttttgaactgtaatttttaaggaagccaaatttgagggcagtttgtcacagttgatttccttctctttcccttcgtcatgtgacctgatatcgggggttagttcgtcatcattgatgagggttgattatcacagtttattactctgaattggctatccgcgtgtgtacctctacctggagtttttcccacggtggatatttcttcttgcgctgagcgtaagagctatctgacagaacagttcttctttgcttcctcgccagttcgctcgctatgctcggttacacggctgcggcg

SEQ ID NO: 17 - DNA, 35283 bp, Artificial Sequence
  Clone pCCI-4K-SARS-CoV-2-WDDDW. Based on SARS-CoV-2.
gatgtgctgcaaggcgattaagttgggtaacgccagggttttcccagtcacgacgttgtaaaacgacggccagtgaattgtaatacgactcactatagggcgaattctagttattaatagtaatcaattacggggtcattagttcatagcccatatatggagttccgcgttacataacttacggtaaatggcccgcctggctgaccgcccaacgacccccgcccattgacgtcaataatgacgtatgttcccatagtaacgccaatagggactttccattgacgtcaatgggtggagtatttacggtaaactgcccacttggcagtacatcaagtgtatcatatgccaagtacgccccctattgacgtcaatgacggtaaatggcccgcctggcattatgcccagtacatgaccttatgggactttcctacttggcagtacatctacgtattagtcatcgctattaccatggtgatgcggttttggcagtacatcaatgggcgtggatagcggtttgactcacggggatttccaagtctccaccccattgacgtcaatgggagtttgttttggcaccaaaatcaacgggactttccaaaatgtcgtaacaactccgccccattgacgcaaatgggcggtaggcgtgtacggtgggaggtctatataagcagagctggtttagtgaaccgtattaaaggtttataccttcccaggtaacaaaccaaccaactttcgatctcttgtagatctgttctctaaacgaactttaaaatctgtgtggctgtcactcggctgcatgcttagtgcactcacgcagtataattaataactaattactgtcgttgacaggacacgagtaactcgtctatcttctgcaggctgcttacggtttcgtccgtgttgcagccgatcatcagcacatctaggtttcgtccgggtgtgaccgaaaggtaagatggagagccttgtccctggtttcaacgagaaaacacacgtccaactcagtttgcctgttttacaggttcgcgacgtgctcgtacgtggctttggagactccgtggaggaggtcttatcagaggcacgtcaacatcttaaagatggcacttgtggcttagtagaagttgaaaaaggcgttttgcctcaacttgaacagccctatgtgttcatcaaacgttcggatgctcgaactgcacctcatggtcatgttatggttgagctggtagcagaactcgaaggcattcagtacggtcgtagtggtgagacacttggtgtccttgtccctcatgtgggcgaaataccagtggcttaccgcaaggttcttcttcgtaagaacggtaataaaggagctggtggccatagttacggcgccgatctaaagtcatttgacttaggcgacgagcttggcactgatccttatgaagattttcaagaaaactggaacactaaacatagcagtggtgttacccgtgaactcatgcgtgagcttaacggaggggcatacactcgctatgtcgataacaacttctgtggccctgatggctaccctcttgagtgcattaaagaccttctagcacgtgctggtaaagcttcatgcactttgtccgaacaactggactttattgacactaagaggggtgtatactgctgccgtgaacatgagcatgaaattgcttggtacacggaacgttctgaaaagagctatgaattgcagacaccttttgaaattaaattggcaaagaaatttgacaccttcaatggggaatgtccaaattttgtatttcccttaaattccataatcaagactattcaaccaagggttgaaaagaaaaagcttgatggctttatgggtagaattcgatctgtctatccagttgcgtcaccaaatgaatgcaaccaaatgtgcctttcaactctcatgaagtgtgatcattgtggtgaaacttcatggcagacgggcgattttgttaaagccacttgcgaattttgtggcactgagaatttgactaaagaaggtgccactacttgtggttacttaccccaaaatgctgttgttaaaatttattgtccagcatgtcacaattcagaagtaggacctgagcatagtcttgccgaataccataatgaatctggcttgaaaaccattcttcgtaagggtggtcgcactattgcctttggaggctgtgtgttctcttatgttggttgccataacaagtgtgcctattgggtcccacgtgctagcgctaacataggttgtaaccatacaggtgttgttggagaaggttccgaaggtcttaatgacaaccttcttgaaatactccaaaaagagaaagtcaacatcaatattgttggtgactttaaacttaatgaagagatcgccattattttggcatctttttctgcttccacaagtgcttttgtggaaactgtgaaaggtttggattataaagcattcaaacaaattgttgaatcctgtggtaattttaaagttacaaaaggaaaagctaaaaaaggtgcctggaatattggtgaacagaaatcaatactgagtcctctttatgcatttgcatcagaggctgctcgtgttgtacgatcaattttctcccgcactcttgaaactgctcaaaattctgtgcgtgttttacagaaggccgctataacaatactagatggaatttcacagtattcactgagactcattgatgctatgatgttcacatctgatttggctactaacaatctagttgtaatggcctacattacaggtggtgttgttcagttgacttcgcagtggctaactaacatctttggcactgtttatgaaaaactcaaacccgtccttgattggcttgaagagaagtttaaggaaggtgtagagtttcttagagacggttgggaaattgttaaatttatctcaacctgtgcttgtgaaattgtcggtggacaaattgtcacctgtgcaaaggaaattaaggagagtgttcagacattctttaagcttgtaaataaatttttggctttgtgtgctgactctatcattattggtggagctaaacttaaagccttgaatttaggtgaaacatttgtcacgcactcaaagggattgtacagaaagtgtgttaaatccagagaagaaactggcctactcatgcctctaaaagccccaaaagaaattatcttcttagagggagaaacacttcccacagaagtgttaacagaggaagttgtcttgaaaactggtgatttacaaccattagaacaacctactagtgaagctgttgaagctccattggttggtacaccagtttgtattaacgggcttatgttgctcgaaatcaaagacacagaaaagtactgtgcccttgcacctaatatgatggtaacaaacaataccttcacactcaaaggcggtgcaccaacaaaggttacttttggtgatgacactgtgatagaagtgcaaggttacaagagtgtgaatatcacttttgaacttgatgaaaggattgataaagtacttaatgagaagtgctctgcctatacagttgaactcggtacagaagtaaatgagttcgcctgtgttgtggcagatgctgtcataaaaactttgcaaccagtatctgaattacttacaccactgggcattgatttagatgagtggagtatggctacatactacttatttgatgagtctggtgagtttaaattggcttcacatatgtattgttctttctaccctccagatgaggatgaagaagaaggtgattgtgaagaagaagagtttgagccatcaactcaatatgagtatggtactgaagatgattaccaaggtaaacctttggaatttggtgccacttctgctgctcttcaacctgaagaagagcaagaagaagattggttagatgatgatagtcaacaaactgttggtcaacaagacggcagtgaggacaatcagacaactactattcaaacaattgttgaggttcaacctcaattagagatggaacttacaccagttgttcagactattgaagtgaatagttttagtggttatttaaaacttactgacaatgtatacattaaaaatgcagacattgtggaagaagctaaaaaggtaaaaccaacagtggttgttaatgcagccaatgtttaccttaaacatggaggaggtgttgcaggagccttaaataaggctactaacaatgccatgcaagttgaatctgatgattacatagctactaatggaccacttaaagtgggtggtagttgtgttttaagcggacacaatcttgctaaacactgtcttcatgttgtcggcccaaatgttaacaaaggtgaagacattcaacttcttaagagtgcttatgaaaattttaatcagcacgaagttctacttgcaccattattatcagctggtatttttggtgctgaccctatacattctttaagagtttgtgtagatactgttcgcacaaatgtctacttagctgtctttgataaaaatctctatgacaaacttgtttcaagctttttggaaatgaagagtgaaaagcaagttgaacaaaagatcgctgagattcctaaagaggaagttaagccatttataactgaaagtaaaccttcagttgaacagagaaaacaagatgataagaaaatcaaagcttgtgttgaagaagttacaacaactctggaagaaactaagttcctcacagaaaacttgttactttatattgacattaatggcaatcttcatccagattctgccactcttgttagtgacattgacatcactttcttaaagaaagatgctccatatatagtgggtgatgttgttcaagagggtgttttaactgctgtggttatacctactaaaaaggctggtggcactactgaaatgctagcgaaagctttgagaaaagtgccaacagacaattatataaccacttacccgggtcaaggtttaaatggttatacggtagaagaagcgaaaacggtactaaaaaaatgtaaatcggcgttttatatactaccgtcgataatatcgaatgaaaaacaagaaatactaggtacggtatcgtggaatttacgtgaaatgctagcgcatgcggaagaaacacgtaaattaatgccggtatgtgtagaaacgaaagcgatagtatcgacgatacaacgtaaatataaaggtataaaaatacaagaaggtgtagtagattatggtgcgcgtttttatttttatacgtcgaaaacgacggtagcgtcgctaataaatacgctaaatgatctaaatgaaacgctagtaacgatgccgctaggttatgtaacgcatggtttaaatttagaagaagcggcgcgttatatgcgttcgctaaaagtaccggcgacggtatcggtatcgtcgccggatgcggtaacggcgtataatggttatctaacgtcgtcgtcgaaaacgccggaagaacattttatagaaacgatatcgctagcgggttcgtataaagattggtcgtattcgggtcaatcgacgcaactaggtatagaatttctaaaacgtggtgataaatcggtatattatacgtcgaatccgacgacgtttcatctagatggtgaagtaataacgtttgataatctaaaaacgctactatcgttacgtgaagtacgtacgataaaagtatttacgacggtagataatataaatctacatacgcaagtagtagatatgtcgatgacatatggacaacaatttggtccgacgtatttagatggtgcggatgttacgaaaataaaaccgcataattcgcatgaaggtaaaacgttttatgtattaccgaatgatgatacgctacgtgtagaagcgtttgaatattatcatacgactgatccgtcgtttctaggtcgttatatgtcggcgttaaatcatacgaaaaaatggaaatatccgcaagtaaatggtttaacgtcgataaaatgggcggataataattgttatctagcgacggcgttattaacgctacaacaaatagaattaaaatttaatccgccggcgctacaagatgcgtattatcgtgcgcgtgcgggtgaagcggcgaatttttgtgcgctaatattagcgtattgtaataaaacggtaggtgaattaggtgatgtacgtgaaacgatgtcgtatttatttcaacatgcgaatttagattcgtgtaaacgtgtattaaatgtagtatgtaaaacgtgtggtcaacaacaaacgacgctaaaaggtgtagaagcggtaatgtatatgggtacgctatcgtatgaacaatttaaaaaaggtgtacaaataccgtgtacgtgtggtaaacaagcgacgaaatatctagtacaacaagaatcgccgtttgtaatgatgtcggcgccgccggcgcaatatgaactaaaacatggtacgtttacgtgtgcgtcggaatatacgggtaattatcaatgtggtcattataaacatataacgtcgaaagaaacgttatattgtatagatggtgcgttacttacgaaatcgtcggaatataaaggtccgataacggatgtattttataaagaaaattcgtatacgacgacgataaaaccggtaacgtataaattagatggtgtagtatgtacggaaatagatccgaaattagataattattataaaaaagataattcgtattttacggaacaaccgatagatctagtaccgaatcaaccatatccgaatgcgtcgtttgataattttaaatttgtatgtgataatataaaatttgcggatgatttaaatcaattaacgggttataaaaaaccggcgtcgcgtgaactaaaagtaacgttttttccggatttaaatggtgatgtagtagcgatagattataaacattatacgccgtcgtttaaaaaaggtgcgaaattattacataaaccgatagtatggcatgtaaataatgcgacgaataaagcgacgtataaaccgaatacgtggtgtatacggtgtctatggagcacgaaaccggtagaaacgtcgaattcgtttgatgtactaaaatcggaagatgcgcaaggtatggataatctagcgtgtgaagatctaaaaccggtatcggaagaagtagtagaaaatccgacgatacaaaaagatgtactggaatgtaatgtaaaaacgacggaagtagtaggtgatataatactaaaaccggctaataattcgttaaaaataacggaagaagtaggtcatacggatctaatggcggcgtatgtagataattcgtcgctaacgataaaaaaaccgaatgaattatcgcgtgtattaggtttaaaaacgctagcgacgcatggtttagctgctgtaaattcggtaccgtgggatacgatagcgaattatgcgaaaccgtttctaaataaagtagtatcgacgacgacgaatatagtaacgcgatgtttaaatcgtgtatgtacgaattatatgccgtatttttttacgttattactacaattatgtacgtttacgcgatcgacgaattcgcgtataaaagcgtcgatgccgacgacgatagcgaaaaatacggtaaaatcggtaggtaaattttgtctagaagcgtcgtttaattatttaaaatcgccgaatttttctaaactaataaatataataatatggtttttactattatcggtatgcctaggttcgttaatatattcgacggcggcgttaggtgtattaatgtcgaatttaggtatgccgtcgtattgtacgggttatcgtgaaggttatttaaattcgacgaatgtaacgatagcgacgtattgtacgggttcgataccgtgttcggtatgtctatcgggtttagattcgttagatacgtatccgtcgttagaaacgatacaaataacgatatcgtcgtttaaatgggatttaacggcgtttggtttagtagcggaatggtttttagcgtatatactatttacgcgatttttttatgtactaggtttagcggcgataatgcaattatttttttcgtattttgcggtacattttatttcgaattcgtggctaatgtggttaataataaatctagtacaaatggcgccgatatcggcgatggtacgtatgtatatattttttgcgtcgttttattatgtatggaaatcgtatgtacatgtagtagatggttgtaattcgtcgacgtgtatgatgtgttataaacgtaatcgtgcgacgcgagtagaatgtacgacgatagtaaatggtgtacgtcgttcgttttatgtatatgcgaatggtggtaaaggtttttgtaaactacataattggaattgtgtaaattgtgatacgttttgtgcgggttcgacgtttatatcggatgaagtagcgcgtgatttatcgctacaatttaaacgtccgataaatccgacggatcaatcgtcgtatatagtagattcggtaacggtaaaaaatggttcgatacatctatattttgataaagcgggtcaaaaaacgtatgaacgtcattcgctatcgcattttgtaaatttagataatctacgtgcgaataatacgaaaggttcgttaccgataaatgtaatagtatttgatggtaaatcgaaatgtgaagaatcgtcggcgaaatcggcgtcggtatattattcgcaactaatgtgtcaaccgatactattactagatcaagcgttagtatcggatgtaggtgattcggcggaagtagcggtaaaaatgtttgatgcgtatgtaaatacgttttcgtcgacgtttaatgtaccgatggaaaaactaaaaacgctagtagcgacggcggaagcggaactagcgaaaaatgtatctttagataatgtattatcgacgtttatatcggcggcgcgtcaaggttttgtagattcggatgtagaaacgaaagatgtagtagaatgtctaaaattatcgcatcaatcggatatagaagtaacgggtgattcgtgtaataattatatgctaacgtataataaagtagaaaatatgacgccgcgtgatctaggtgcgtgtatagattgttcggcgcgtcatataaatgcgcaagtagcgaaatcgcataatatagcgttaatatggaatgtaaaagattttatgtcgttatcggaacaactacgtaaacaaatacgttcggcggcgaaaaaaaataatttaccgtttaaattaacgtgtgcgacgacgcgacaagtagtaaatgtagtaacgacgaaaatagcgctaaaaggtggtaaaatagtaaataattggttaaaacaattaattaaagtaacgctagtatttctatttgtagcggcgatattttatttaataacgccggtacatgtaatgtcgaaacatacggatttttcgtcggaaataataggttataaagcgatagatggtggtgtaactcgtgatatagcgtcgacggatacgtgttttgcgaataaacatgcggattttgatacgtggttttcgcaacgtggtggttcgtatacgaatgataaagcgtgtccgttaatagcggcggtaataacacgtgaagtaggttttgtagtaccgggtttaccgggtacgatattacgtacgacgaatggtgattttttacattttttaccgcgtgtattttcggcggtaggtaatatatgttatacgccgtcgaaactaatagaatatacggattttgcgacgtcggcgtgtgtattagcggcggaatgtacgatatttaaagatgcgtcgggtaaaccggtaccgtattgttatgatacgaatgtactagaaggttcggtagcgtatgaatcgttacgcccggatacacgttatgtactaatggatggttcgataatacaatttccgaatacgtatctagaaggttcggtacgtgtagtaacgacgtttgattcggaatattgtcgtcatggtacgtgtgaacgttcggaagcgggtgtatgtgtatcgacgtcggggcgttgggtactaaataatgattattatcgttcgttaccgggtgtattctgtggtgtagatgcggtaaatttactaacgaatatgtttacgccgctgatacaaccgataggtgcgttagatatatcggcgtcgatagtagcgggtggtatagtagcgatagtagtaacgtgtctagcgtattattttatgcgttttcgtcgtgcgtttggtgaatattcgcatgtagtagcgtttaatacgttactatttctaatgtcttttacagtactatgtttaacgccggtatattcttttttaccgggtgtatattcggtaatatatttatatttaacgttttatctaacgaatgatgtatcgtttttagcgcatatacaatggatggtaatgtttacgccgttagtaccgttttggataacaatagcgtatataatatgtatatcgacgaaacatttttattggtttttttcgaattatctgaaacgtcgtgtagtatttaatggtgtatctttttcgacgtttgaagaagcggcgctatgtacatttttattaaataaagaaatgtatctaaaattacgttcggatgtactattaccgctaacgcaatataatcgttatttagcgctatataataaatataaatatttttcgggtgcgatggatacgacgtcgtatcgtgaagcggcgtgttgtcatctagcgaaagcgctaaatgatttttcgaattcgggttcggatgtactatatcaaccgccgcaaacgtcgataacgtcggcggtattacaatcgggttttcgtaaaatggcgtttccgtcgggtaaagtagaaggttgtatggtacaagtaacgtgtggtacgacgacgctaaatggtctatggctagatgatgtagtatattgtccgcgtcatgtaatatgtacgtcggaagatatgctaaatccgaattatgaagatttactaatacgtaaatcgaatcataattttttagtacaagcgggtaatgtacaactacgtgtaataggtcattcgatgcaaaattgtgtactaaaactaaaagtagatacggcgaatccgaaaacaccgaaatataaatttgtacgtatacaaccgggtcaaacgttttcggtattagcgtgttataatggttctccgtcgggtgtatatcaatgtgcgatgcgtccgaattttacgattaaaggttcgtttctaaatggttcgtgtggttcggtaggttttaatatagattatgattgtgtatcgttttgttatatgcatcatatggaattaccgacgggtgtacatgcgggtacggatttagaaggtaatttttatggtccgtttgtagatcgtcaaacagcgcaagcggcgggtacggatacgacgattacggtaaatgtattagcgtggttatatgcggcggtaataaatggtgatcgttggtttctaaatcgttttacgacgacgctaaatgattttaatctagtagcgatgaaatataattatgaaccgctgacacaagatcatgtagatatactaggtccgctatcggcgcaaacgggtatagcggtattagatatgtgtgcgtcgttaaaagaattactacaaaatggtatgaatggtcgtacgatattaggttcggcgttattagaagatgaatttacgccgtttgatgtagtacgtcaatgttcgggtgtaacgtttcaatcggcggtaaaacgtacgataaaaggtacgcatcattggttattactaacgatattaacgtcgctattagtattagtacaatcgacgcaatggtcgttatttttttttttatatgaaaatgcgtttttaccgtttgcgatgggtataatagcgatgtcggcgtttgcgatgatgtttgtaaaacataagcatgcatttctctgtttgtttttgttaccttctcttgccactgtagcttattttaatatggtctatatgcctgctagttgggtgatgcgtattatgacatggttggatatggttgatactagtttgtctggttttaagctaaaagactgtgttatgtatgcatcagctgtagtgttactaatccttatgacagcaagaactgtgtatgatgatggtgctaggagagtgtggacacttatgaatgtcttgacactcgtttataaagtttattatggtaatgctttagatcaagccatttccatgtgggctcttataatctctgttacttctaactactcaggtgtagttacaactgtcatgtttttggccagaggtattgtttttatgtgtgttgagtattgccctattttcttcataactggtaatacacttcagtgtataatgctagtttattgtttcttaggctatttttgtacttgttactttggcctcttttgtttactcaaccgctactttagactgactcttggtgtttatgattacttagtttctacacaggagtttagatatatgaattcacagggactactcccacccaagaatagcatagatgccttcaaactcaacattaaattgttgggtgttggtggcaaaccttgtatcaaagtagccactgtacagtctaaaatgtcagatgtaaagtgcacatcagtagtcttactctcagttttgcaacaactcagagtagaatcatcatctaaattgtgggctcaatgtgtccagttacacaatgacattctcttagctaaagatactactgaagcctttgaaaaaatggtttcactactttctgttttgctttccatgcagggtgctgtagacataaacaagctttgtgaagaaatgctggacaacagggcaaccttacaagctatagcctcagagtttagttcccttccatcatatgcagcttttgctactgctcaagaagcttatgagcaggctgttgctaatggtgattctgaagttgttcttaaaaagttgaagaagtctttgaatgtggctaaatctgaatttgaccgtgatgcagccatgcaacgtaagttggaaaagatggctgatcaagctatgacccaaatgtataaacaggctagatctgaggacaagagggcaaaagttactagtgctatgcagacaatgcttttcactatgcttagaaagttggataatgatgcactcaacaacattatcaacaatgcaagagatggttgtgttcccttgaacataatacctcttacaacagcagccaaactaatggttgtcataccagactataacacatataaaaatacgtgtgatggtacaacatttacttatgcatcagcattgtgggaaatccaacaggttgtagatgcagatagtaaaattgttcaacttagtgaaattagtatggacaattcacctaatttagcatggcctcttattgtaacagctttaagggccaattctgctgtcaaattacagaataatgagcttagtcctgttgcactacgacagatgtcttgtgctgccggtactacacaaactgcttgcactgatgacaatgcgttagcttactacaacacaacaaagggaggtaggtttgtacttgcactgttatccgatttacaggatttgaaatgggctagattccctaagagtgatggaactggtactatctatacagaactggaaccaccttgtaggtttgttacagacacacctaaaggtcctaaagtgaagtatttatactttattaaaggattaaacaacctaaatagaggtatggtacttggtagtttagctgccacagtacgtctacaagctggtaatgcaacagaagtgcctgccaattcaactgtattatctttctgtgcttttgctgtagatgctgctaaagcttacaaagattatctagctagtgggggacaaccaatcactaattgtgttaagatgttgtgtacacacactggtactggtcaggcaataacagttacaccggaagccaatatggatcaagaatcctttggtggtgcatcgtgttgtctgtactgccgttgccacatagatcatccaaatcctaaaggattttgtgacttaaaaggtaagtatgtacaaatacctacaacttgtgctaatgaccctgtgggttttacacttaaaaacacagtctgtaccgtctgcggtatgtggaaaggttatggctgtagttgtgatcaactccgcgaacccatgcttcagtcagctgatgcacaatcgtttttaaacgggtttgcggtgtaagtgcagcccgtcttacaccgtgcggcacaggcactagtactgatgtcgtatacagggcttttgacatctacaatgataaagtagctggttttgctaaattcctaaaaactaattgttgtcgcttccaagaaaaggacgaagatgacaatttaattgattcttactttgtagttaagagacacactttctctaactaccaacatgaagaaacaatttataatttacttaaggattgtccagctgttgctaaacatgacttctttaagtttagaatagacggtgacatggtaccacatatatcacgtcaacgtcttactaaatacacaatggcagacctcgtctatgctttaaggcattttgatgaaggtaattgtgacacattaaaagaaatacttgtcacatacaattgttgtgatgatgattatttcaataaaaaggactggtatgattttgtagaaaacccagatatattacgcgtatacgccaacttaggtgaacgtgtacgccaagctttgttaaaaacagtacaattctgtgatgccatgcgaaatgctggtattgttggtgtactgacattagataatcaagatctcaatggtaactggtatgatttcggtgatttcatacaaaccacgccaggtagtggagttcctgttgtagattcttattattcattgttaatgcctatattaaccttgaccagggctttaactgcagagtcacatgttgacactgacttaacaaagccttacattaagtgggatttgttaaaatatgacttcacggaagagaggttaaaactctttgaccgttattttaaatattgggatcagacataccacccaaattgtgttaactgtttggatgacagatgcattctgcattgtgcaaactttaatgttttattctctacagtgttcccacctacaagttttggaccactagtgagaaaaatatttgttgatggtgttccatttgtagtttcaactggataccacttcagagagctaggtgttgtacataatcaggatgtaaacttacatagctctagacttagttttaaggaattacttgtgtatgctgctgaccctgctatgcacgctgcttctggtaatctattactagataaacgcactacgtgcttttcagtagctgcacttactaacaatgttgcttttcaaactgtcaaacccggtaattttaacaaagacttctatgactttgctgtgtctaagggtttctttaaggaaggaagttctgttgaattaaaacacttcttctttgctcaggatggtaatgctgctatcagcgattatgactactatcgttataatctaccaacaatgtgtgatatcagacaactactatttgtagttgaagttgttgataagtactttgattgttacgatggtggctgtattaatgctaaccaagtcatcgtcaacaacctagacaaatcagctggttttccatttaataaatggggtaaggctagactttattatgattcaatgagttatgaggatcaagatgcacttttcgcatatacaaaacgtaatgtcatccctactataactcaaatgaatcttaagtatgccattagtgcaaagaatagagctcgcaccgtagctggtgtctctatctgtagtactatgaccaatagacagtttcatcaaaaattattgaaatcaatagccgccactagaggagctactgtagtaattggaacaagcaaattctatggtggttggcacaacatgttaaaaactgtttatagtgatgtagaaaaccctcaccttatgggttgggattatcctaaatgtgatagagccatgcctaacatgcttagaattatggcctcacttgttcttgctcgcaaacatacaacgtgttgtagcttgtcacaccgtttctatagattagctaatgagtgtgctcaagtattgagtgaaatggtcatgtgtggcggttcactatatgttaaaccaggtggaacctcatcaggagatgccacaactgcttatgctaatagtgtttttaacatttgtcaagctgtcacggccaatgttaatgcacttttatctactgatggtaacaaaattgccgataagtatgtccgcaatttacaacacagactttatgagtgtctctatagaaatagagatgttgacacagactttgtgaatgagttttacgcatatttgcgtaaacatttctcaatgatgatactctctgacgatgctgttgtgtgtttcaatagcacttatgcatctcaaggtctagtggctagcataaagaactttaagtcagttctttattatcaaaacaatgtttttatgtctgaagcaaaatgttggactgagactgaccttactaaaggacctcatgaattttgctctcaacatacaatgctagttaaacagggtgatgattatgtgtaccttccttacccagatccatcaagaatcctaggggccggctgttttgtagatgatatcgtaaaaacagatggtacacttatgattgaacggttcgtgtctttagctatagatgcttacccacttactaaacatcctaatcaggagtatgctgatgtctttcatttgtacttacaatacataagaaagctacatgatgagttaacaggacacatgttagacatgtattctgttatgcttactaatgataacacttcaaggtattgggaacctgagttttatgaggctatgtacacaccgcatacagtcttacaggctgttggggcttgtgttctttgcaattcacagacttcattaagatgtggtgcttgcatacgtagaccattcttatgttgtaaatgctgttacgaccatgtcatatcaacatcacataaattagtcttgtctgttaatccgtatgtttgcaatgctccaggttgtgatgtcacagatgtgactcaactttacttaggaggtatgagctattattgtaaatcacataaaccacccattagttttccattgtgtgctaatggacaagtttttggtttatataaaaatacatgtgttggtagcgataatgttactgactttaatgcaattgcaacatgtgactggacaaatgctggtgattacattttagctaacacctgtactgaaagactcaagctttttgcagcagaaacgctcaaagctactgaggagacatttaaactgtcttatggtattgctactgtacgtgaagtgctgtctgacagagaattacatctttcatgggaagttggtaaacctagaccaccacttaaccgaaattatgtctttactggttatcgtgtaactaaaaacagtaaagtacaaataggagagtacacctttgaaaaaggtgactatggtgatgctgttgtttaccgaggtacaacaacttacaaattaaatgttggtgattattttgtgctgacatcacatacagtaatgccattaagtgcacctacactagtgccacaagagcactatgttagaattactggcttatacccaacactcaatatctcagatgagttttctagcaatgttgcaaattatcaaaaggttggtatgcaaaagtattctacactccagggaccacctggtactggtaagagtcattttgctattggcctagctctctactacccttctgctcgcatagtgtatacagcttgctctcatgccgctgttgatgcactatgtgagaaggcattaaaatatttgcctatagataaatgtagtagaattatacctgcacgtgctcgtgtagagtgttttgataaattcaaagtgaattcaacattagaacagtatgtcttttgtactgtaaatgcattgcctgagacgacagcagatatagttgtctttgatgaaatttcaatggccacaaattatgatttgagtgttgtcaatgccagattacgtgctaagcactatgtgtacattggcgaccctgctcaattacctgcaccacgcacattgctaactaagggcacactagaaccagaatatttcaattcagtgtgtagacttatgaaaactataggtccagacatgttcctcggaacttgtcggcgttgtcctgctgaaattgttgacactgtgagtgctttggtttatgataataagcttaaagcacataaagacaaatcagctcaatgctttaaaatgttttataagggtgttatcacgcatgatgtttcatctgcaattaacaggccacaaataggcgtggtaagagaattccttacacgtaaccctgcttggagaaaagctgtctttatttcaccttataattcacagaatgctgtagcctcaaagattttgggactaccaactcaaactgttgattcatcacagggctcagaatatgactatgtcatattcactcaaaccactgaaacagctcactcttgtaatgtaaacagatttaatgttgctattaccagagcaaaagtaggcatactttgcataatgtctgatagagacctttatgacaagttgcaatttacaagtcttgaaattccacgtaggaatgtggcaactttacaagctgaaaatgtaacaggactctttaaagattgtagtaaggtaatcactgggttacatcctacacaggcacctacacacctcagtgttgacactaaattcaaaactgaaggtttatgtgttgacatacctggcatacctaaggacatgacctatagaagactcatctctatgatgggttttaaaatgaattatcaagttaatggttaccctaacatgtttatcacccgcgaagaagctataagacatgtacgtgcatggattggcttcgatgtcgaggggtgtcatgctactagagaagctgttggtaccaatttacctttacagctaggtttttctacaggtgttaacctagttgctgtacctacaggttatgttgatacacctaataatacagatttttccagagttagtgctaaaccaccgcctggagatcaatttaaacacctcataccacttatgtacaaaggacttccttggaatgtagtgcgtataaagattgtacaaatgttaagtgacacacttaaaaatctctctgacagagtcgtatttgtcttatgggcacatggctttgagttgacatctatgaagtattttgtgaaaataggacctgagcgcacctgttgtctatgtgatagacgtgccacatgcttttccactgcttcagacacttatgcctgttggcatcattctattggatttgattacgtctataatccgtttatgattgatgttcaacaatggggttttacaggtaacctacaaagcaaccatgatctgtattgtcaagtccatggtaatgcacatgtagctagttgtgatgcaatcatgactaggtgtctagctgtccacgagtgctttgttaagcgtgttgactggactattgaatatcctataattggtgatgaactgaagattaatgcggcttgtagaaaggttcaacacatggttgttaaagctgcattattagcagacaaattcccagttcttcacgacattggtaaccctaaagctattaagtgtgtacctcaagctgatgtagaatggaagttctatgatgcacagccttgtagtgacaaagcttataaaatagaagaattattctattcttatgccacacattctgacaaattcacagatggtgtatgcctattttggaattgcaatgtcgatagatatcctgctaattccattgtttgtagatttgacactagagtgctatctaaccttaacttgcctggttgtgatggtggcagtttgtatgtaaataaacatgcattccacacaccagcttttgataaaagtgcttttgttaatttaaaacaattaccatttttctattactctgacagtccatgtgagtctcatggaaaacaagtagtgtcagatatagattatgtaccactaaagtctgctacgtgtataacacgttgcaatttaggtggtgctgtctgtagacatcatgctaatgagtacagattgtatctcgatgcttataacatgatgatctcagctggctttagcttgtgggtttacaaacaatttgatacttataacctctggaacacttttacaagacttcagagtttagaaaatgtggcttttaatgttgtaaataagggacactttgatggacaacagggtgaagtaccagtttctatcattaataacactgtttacacaaaagttgatggtgttgatgtagaattgtttgaaaataaaacaacattacctgttaatgtagcatttgagctttgggctaagcgcaacattaaaccagtaccagaggtgaaaatactcaataatttgggtgtggacattgctgctaatactgtgatctgggactacaaaagagatgctccagcacatatatctactattggtgtttgttctatgactgacatagccaagaaaccaactgaaacgatttgtgcaccactcactgtcttttttgatggtagagttgatggtcaagtagacttatttagaaatgcccgtaatggtgttcttattacagaaggtagtgttaaaggtttacaaccatctgtaggtcccaaacaagctagtcttaatggagtcacattaattggagaagccgtaaaaacacagttcaattattataagaaagttgatggtgttgtccaacaattacctgaaacttactttactcagagtagaaatttacaagaatttaaacccaggagtcaaatggaaattgatttcttagaattagctatggatgaattcattgaacggtataaattagaaggctatgccttcgaacatatcgtttatggagattttagtcatagtcagttaggtggtttacatctactgattggactagctaaacgttttaaggaatcaccttttgaattagaagattttattcctatggacagtacagttaaaaactatttcataacagatgcgcaaacaggttcatctaagtgtgtgtgttctgttattgatttattacttgatgattttgttgaaataataaaatcccaagatttatctgtagtttctaaggttgtcaaagtgactattgactatacagaaatttcatttatgctttggtgtaaagatggccatgtagaaacattttacccaaaattacaatctagtcaagcgtggcaaccgggtgttgctatgcctaatctttacaaaatgcaaagaatgctattagaaaagtgtgaccttcaaaattatggtgatagtgcaacattacctaaaggcataatgatgaatgtcgcaaaatatactcaactgtgtcaatatttaaacacattaacattagctgtaccctataatatgagagttatacattttggtgctggttctgataaaggagttgcaccaggtacagctgttttaagacagtggttgcctacgggtacgctgcttgtcgattcagatcttaatgactttgtctctgatgcagattcaactttgattggtgattgtgcaactgtacatacagctaataaatgggatctcattattagtgatatgtacgaccctaagactaaaaatgttacaaaagaaaatgactctaaagagggttttttcacttacatttgtgggtttatacaacaaaagctagctcttggaggttccgtggctataaagataacagaacattcttggaatgctgatctttataagctcatgggacacttcgcatggtggacagcctttgttactaatgtgaatgcgtcatcatctgaagcatttttaattggatgtaattatcttggcaaaccacgcgaacaaatagatggttatgtcatgcatgcaaattacatattttggaggaatacaaatccaattcagttgtcttcctattctttatttgacatgagtaaatttccccttaaattaaggggtactgctgttatgtctttaaaagaaggtcaaatcaatgatatgattttatctcttcttagtaaaggtagacttataattagagaaaacaacagagttgttatttctagtgatgttcttgttaacaactaaacgaacaatgtttgtttttcttgttttattgccactagtctctagtcagtgtgttaatcttacaaccagaactcaattaccccctgcatacactaattctttcacacgtggtgtttattaccctgacaaagttttcagatcctcagttttacattcaactcaggacttgttcttacctttcttttccaatgttacttggttccatgctatacatgtctctgggaccaatggtactaagaggtttgataaccctgtcctaccatttaatgatggtgtttattttgcttccactgagaagtctaacataataagaggctggatttttggtactactttagattcgaagacccagtccctacttattgttaataacgctactaatgttgttattaaagtctgtgaatttcaattttgtaatgatccatttttgggtgtttattaccacaaaaacaacaaaagttggatggaaagtgagttcagagtttattctagtgcgaataattgcacttttgaatatgtctctcagccttttcttatggaccttgaaggaaaacagggtaatttcaaaaatcttagggaatttgtgtttaagaatattgatggttattttaaaatatattctaagcacacgcctattaatttagtgcgtgatctcccccagggtttttcggctttagaaccattggtagatttgccaataggtattaacatcactaggtttcaaactttacttgctttacatagaagttatttgactcctggtgattcttcttcaggttggacagctggtgctgcagcttattatgtgggttatcttcaacctaggacttttctattaaaatataatgaaaatggaaccattacagatgctgtagactgtgcacttgaccctctctcagaaacaaagtgtacgttgaaatccttcactgtagaaaaaggaatctatcaaacttctaactttagagtccaaccaacagaatctattgttagatttcctaatattacaaacttgtgcccttttggtgaagtttttaacgccaccagatttgcatctgtttatgcttggaacaggaagagaatcagcaactgtgttgctgattattctgtcctatataattccgcatcattttccacttttaagtgttatggagtgtctcctactaaattaaatgatctctgctttactaatgtctatgcagattcatttgtaattagaggtgatgaagtcagacaaatcgctccagggcaaactggaaagattgctgattataattataaattaccagatgattttacaggctgcgttatagcttggaattctaacaatcttgattctaaggttggtggtaattataattacctgtatagattgtttaggaagtctaatctcaaaccttttgagagagatatttcaactgaaatctatcaggccggtagcacaccttgtaatggtgttgaaggttttaattgttactttcctttacaatcatatggtttccaacccactaatggtgttggttaccaaccatacagagtagtagtactttcttttgaacttctacatgcaccagcaactgtttgtggacctaaaaagtctactaatttggttaaaaacaaatgtgtcaatttcaacttcaatggtttaacaggcacaggtgttcttactgagtctaacaaaaagtttctgcctttccaacaatttggcagagacattgctgacactactgatgctgtccgtgatccacagacacttgagattcttgacattacaccatgttcttttggtggtgtcagtgttataacaccaggaacaaatacttctaaccaggttgctgttctttatcaggatgttaactgcacagaagtccctgttgctattcatgcagatcaacttactcctacttggcgtgtttattctacaggttctaatgtttttcaaacacgtgcaggctgtttaataggggctgaacatgtcaacaactcatatgagtgtgacatacccattggtgcaggtatatgcgctagttatcagactcagactaattctcctcggcgggcacgtagtgtagctagtcaatccatcattgcctacactatgtcacttggtgcagaaaattcagttgcttactctaataactctattgccatacccacaaattttactattagtgttaccacagaaattctaccagtgtctatgaccaagacatcagtagattgtacaatgtacatttgtggtgattcaactgaatgcagcaatcttttgttgcaatatggcagtttttgtacacaattaaaccgtgctttaactggaatagctgttgaacaagacaaaaacacccaagaagtttttgcacaagtcaaacaaatttacaaaacaccaccaattaaagattttggtggttttaatttttcacaaatattaccagatccatcaaaaccaagcaagaggtcatttattgaagatctacttttcaacaaagtgacacttgcagatgctggcttcatcaaacaatatggtgattgccttggtgatattgctgctagagacctcatttgtgcacaaaagtttaacggccttactgttttgccacctttgctcacagatgaaatgattgctcaatacacttctgcactgttagcgggtacaatcacttctggttggacctttggtgcaggtgctgcattacaaataccatttgctatgcaaatggcttataggtttaatggtattggagttacacagaatgttctctatgagaaccaaaaattgattgccaaccaatttaatagtgctattggcaaaattcaagactcactttcttccacagcaagtgcacttggaaaacttcaagatgtggtcaaccaaaatgcacaagctttaaacacgcttgttaaacaacttagctccaattttggtgcaatttcaagtgttttaaatgatatcctttcacgtcttgacaaagttgaggctgaagtgcaaattgataggttgatcacaggcagacttcaaagtttgcagacatatgtgactcaacaattaattagagctgcagaaatcagagcttctgctaatcttgctgctactaaaatgtcagagtgtgtacttggacaatcaaaaagagttgatttttgtggaaagggctatcatcttatgtccttccctcagtcagcacctcatggtgtagtcttcttgcatgtgacttatgtccctgcacaagaaaagaacttcacaactgctcctgccatttgtcatgatggaaaagcacactttcctcgtgaaggtgtctttgtttcaaatggcacacactggtttgtaacacaaaggaatttttatgaaccacaaatcattactacagacaacacatttgtgtctggtaactgtgatgttgtaataggaattgtcaacaacacagtttatgatcctttgcaacctgaattagactcattcaaggaggagttagataaatattttaagaatcatacatcaccagatgttgatttaggtgacatctctggcattaatgcttcagttgtaaacattcaaaaagaaattgaccgcctcaatgaggttgccaagaatttaaatgaatctctcatcgatctccaagaacttggaaagtatgagcagtatataaaatggccatggtacatttggctaggttttatagctggcttgattgccatagtaatggtgacaattatgctttgctgtatgaccagttgctgtagttgtctcaagggctgttgttcttgtggatcctgctgcaaatttgatgaagacgactctgagccagtgctcaaaggagtcaaattacattacacataaacgaacttatggatttgtttatgagaatcttcacaattggaactgtaactttgaagcaaggtgaaatcaaggatgctactccttcagattttgttcgcgctactgcaacgataccgatacaagcctcactccctttcggatggcttattgttggcgttgcacttcttgctgtttttcagagcgcttccaaaatcataaccctcaaaaagagatggcaactagcactctccaagggtgttcactttgtttgcaacttgctgttgttgtttgtaacagtttactcacaccttttgctcgttgctgctggccttgaagccccttttctctatctttatgctttagtctacttcttgcagagtataaactttgtaagaataataatgaggctttggctttgctggaaatgccgttccaaaaacccattactttatgatgccaactattttctttgctggcatactaattgttacgactattgtataccttacaatagtgtaacttcttcaattgtcattacttcaggtgatggcacaacaagtcctatttctgaacatgactaccagattggtggttatactgaaaaatgggaatctggagtaaaagactgtgttgtattacacagttacttcacttcagactattaccagctgtactcaactcaattgagtacagacactggtgttgaacatgttaccttcttcatctacaataaaattgttgatgagcctgaagaacatgtccaaattcacacaatcgacggttcatccggagttgttaatccagtaatggaaccaatttatgatgaaccgacgacgactactagcgtgcctttgtaagcacaagctgatgagtacgaacttatgtactcattcgtttcggaagagacaggtacgttaatagttaatagcgtacttctttttcttgctttcgtggtattcttgctagttacactagccatccttactgcgcttcgattgtgtgcgtactgctgcaatattgttaacgtgagtcttgtaaaaccttctttttacgtttactctcgtgttaaaaatctgaattcttctagagttcctgatcttctggtctaaacgaactaaatattatattagtttttctgtttggaactttaattttagccatggcagattccaacggtactattaccgttgaagagcttaaaaagctccttgaacaatggaacctagtaataggtttcctattccttacatggatttgtcttctacaatttgcctatgccaacaggaataggtttttgtatataattaagttaattttcctctggctgttatggccagtaactttagcttgttttgtgcttgctgctgtttacagaataaattggatcaccggtggaattgctatcgcaatggcttgtcttgtaggcttgatgtggctcagctacttcattgcttctttcagactgtttgcgcgtacgcgatccatgtggtcattcaatccagaaactaacattcttctcaacgtgccactccatggcactattctgaccagaccgcttctagaaagtgaactcgtaatcggagctgtgatccttcgtggacatcttcgtattgctggacaccatctaggacgctgtgacatcaaggacctgcctaaagaaatcactgttgctacatcacgaacgctttcttattacaaattgggagcttcgcagcgtgtagcaggtgactcaggttttgctgcatacagtcgctacaggattggcaactataaattaaacacagaccattccagtagcagtgacaatattgctttgcttgtacagtaagtgacaacagatgtttcatctcgttgactttcaggttactatagcagagatattactaattattatgaggacttttaaagtttccatttggaatcttgattacatcataaacctcataattaaaaatttatctaagtcactaactgagaataaatattctcaattagatgaagagcaaccaatggagattgattaaacgaacatgaaaattattcttttcttggcactgataacactcgctacttgtgagctttatcactaccaagagtgtgttagaggtacaacagtacttttaaaagaaccttgctcttctggaacatacgagggcaattcaccatttcatcctctagctgataacaaatttgcactgacttgctttagcactcaatttgcttttgcttgtcctgacggcgtaaaacacgtctatcagttacgtgccagatcagtttcacctaaactgttcatcagacaagaggaagttcaagaactttactctccaatttttcttattgttgcggcaatagtgtttataacactttgcttcacactcaaaagaaagacagaatgattgaactttcattaattgacttctatttgtgctttttagcctttctgctattccttgttttaattatgcttattatcttttggttctcacttgaactgcaagatcataatgaaacttgtcacgcctaaacgaacatgaaatttcttgttttcttaggaatcatcacaactgtagctgcatttcaccaagaatgtagtttacagtcatgtactcaacatcaaccatatgtagttgatgacccgtgtcctattcacttctattctaaatggtatattagagtaggagctagaaaatcagcacctttaattgaattgtgcgtggatgaggctggttctaaatcacccattcagtacatcgatatcggtaattatacagtttcctgtttaccttttacaattaattgccaggaacctaaattgggtagtcttgtagtgcgttgttcgttctatgaagactttttagagtatcatgacgttcgtgttgttttagatttcatctaaacgaacaaactaaaatgtctgataatggaccccaaaatcagcgaaatgcaccccgcattacgtttggtggaccctcagattcaactggcagtaaccagaatggagaacgcagtggggcgcgatcaaaacaacgtcggccccaaggtttacccaataatactgcgtcttggttcaccgctctcactcaacatggcaaggaagaccttaaattccctcgaggacaaggcgttccaattaacaccaatagcagtccagatgaccaaattggctactaccgaagagctaccagacgaattcgtggtggtgacggtaaaatgaaagatctcagtccaagatggtatttctactacctaggaactgggccagaagctggacttccctatggtgctaacaaagacggcatcatatgggttgcaactgagggagccttgaatacaccaaaagatcacattggcacccgcaatcctgctaacaatgctgcaatcgtgctacaacttcctcaaggaacaacattgccaaaaggcttctacgcagaagggagcagaggcggcagtcaagcctcttctcgttcctcatcacgtagtcgcaacagttcaagaaattcaactccaggcagcagtaggggaacttctcctgctagaatggctggcaatggcggtgatgctgctcttgctttgctgctgcttgacagattgaaccagcttgagagcaaaatgtctggtaaaggccaacaacaacaaggccaaactgtcactaagaaatctgctgctgaggcttctaagaagcctcggcaaaaacgtactgccactaaagcatacaatgtaacacaagctttcggcagacgtggtccagaacaaacccaaggaaattttggggaccaggaactaatcagacaaggaactgattacaaacattggccgcaaattgcacaatttgcccccagcgcttcagcgttcttcggaatgtcgcgcattggcatggaagtcacaccttcgggaacgtggttgacctacacaggtgccatcaaattggatgacaaagatccaaatttcaaagatcaagtcattttgctgaataagcatattgacgcatacaaaacattcccaccaacagagcctaaaaaggacaaaaagaagaaggctgatgaaactcaagccttaccgcagagacagaagaaacagcaaactgtgactcttcttcctgctgcagatttggatgatttctccaaacaattgcaacaatccatgagcagtgctgactcaactcaggcctaaactcatgcagaccacacaaggcagatgggctatataaacgttttcgcttttccgtttacgatatatagtctactcttgtgcagaatgaattctcgtaactacatagcacaagtagatgtagttaactttaatctcacatagcaatctttaatcagtgtgtaacattagggaggacttgaaagagccaccacattttcaccgaggccacgcggagtacgatcgagtgtacagtgaacaatgctagggagagctgcctatatggaagagccctaatgtgtaaaattaattttagtagtgctatccccatgtgattttaatagcttcttaggagaatgacaaaaaaaaaaaaaaaaaaaaaaaaaaaaaaaaaaaaaaaaaaaaaaaaaaaaaaaaaaagggtcggcatggcatctccacctcctcgcggtccgacctgggcatccgaaggaggacgcacgtccactcggatggctaagggagcagcacactggcggccgttactagggccgcgcccttcccaacagttgcgcagcctgaatggcgaatggagatccaatttttaagtgtataatgtgttaaactactgattctaattgtttgtgtattttagattcacagtcccaaggctcatttcaggcccctcagtcctcacagtctgttcatgatcataatcagccataccacatttgtagaggttttacttgctttaaaaaacctcccacacctccccctgaacctgaaacataaaatgaatgcaattgttgttgttaacttgtttattgcagcttataatggttacaaataaagcaatagcatcacaaatttcacaaataaagcatttttttcactgcattctagttgtggtttgtccaaactcatcaatgtatcttaaagcttgagtattctatagtctcacctaaatagcttggcgtaatcatggtcatagctgtttcctgtgtgaaattgttatccgctcacaattccacacaacatacgagccggaagcataaagtgtaaagcctggggtgcctaatgagtgagctaactcacattaattgcgttgcgctcactgcccgctttccagtcgggaaacctgtcgtgccagctgcattaatgaatcggccaacgcgaaccccttgcggccgcccgggccgtcgaccaattctcatgtttgacagcttatcatcgaatttctgccattcatccgcttattatcacttattcaggcgtagcaaccaggcgtttaagggcaccaataactgccttaaaaaaattacgccccgccctgccactcatcgcagtactgttgtaattcattaagcattctgccgacatggaagccatcacaaacggcatgatgaacctgaatcgccagcggcatcagcaccttgtcgccttgcgtataatatttgcccatggtgaaaacgggggcgaagaagttgtccatattggccacgtttaaatcaaaactggtgaaactcacccagggattggctgagacgaaaaacatattctcaataaaccctttagggaaataggccaggttttcaccgtaacacgccacatcttgcgaatatatgtgtagaaactgccggaaatcgtcgtggtattcactccagagcgatgaaaacgtttcagtttgctcatggaaaacggtgtaacaagggtgaacactatcccatatcaccagctcaccgtctttcattgccatacgaaattccggatgagcattcatcaggcgggcaagaatgtgaataaaggccggataaaacttgtgcttatttttctttacggtctttaaaaaggccgtaatatccagctgaacggtctggttataggtacattgagcaactgactgaaatgcctcaaaatgttctttacgatgccattgggatatatcaacggtggtatatccagtgatttttttctccattttagcttccttagctcctgaaaatctcgataactcaaaaaatacgcccggtagtgatcttatttcattatggtgaaagttggaacctcttacgtgccgatcaacgtctcattttcgccaaaagttggcccagggcttcccggtatcaacagggacaccaggatttatttattctgcgaagtgatcttccgtcacaggtatttattcgcgataagctcatggagcggcgtaaccgtcgcacaggaaggacagagaaagcgcggatctgggaagtgacggacagaacggtcaggacctggattggggaggcggttgccgccgctgctgctgacggtgtgacgttctctgttccggtcacaccacatacgttccgccattcctatgcgatgcacatgctgtatgccggtataccgctgaaagttctgcaaagcctgatgggacataagtccatcagttcaacggaagtctacacgaaggtttttgcgctggatgtggctgcccggcaccgggtgcagtttgcgatgccggagtctgatgcggttgcgatgctgaaacaattatcctgagaataaatgccttggcctttatatggaaatgtggaactgagtggatatgctgtttttgtctgttaaacagagaagctggctgttatccactgagaagcgaacgaaacagtcgggaaaatctcccattatcgtagagatccgcattattaatctcaggagcctgtgtagcgtttataggaagtagtgttctgtcatgatgcctgcaagcggtaacgaaaacgatttgaatatgccttcaggaacaatagaaatcttcgtgcggtgttacgttgaagtggagcggattatgtcagcaatggacagaacaacctaatgaacacagaaccatgatgtggtctgtccttttacagccagtagtgctcgccgcagtcgagcgacagggcgaagccctcggctggttgccctcgccgctgggctggcggccgtctatggccctgcaaacgcgccagaaacgccgtcgaagccgtgtgcgagacaccgcggccggccgccggcgttgtggatacctcgcggaaaacttggccctcactgacagatgaggggcggacgttgacacttgaggggccgactcacccggcgcggcgttgacagatgaggggcaggctcgatttcggccggcgacgtggagctggccagcctcgcaaatcggcgaaaacgcctgattttacgcgagtttcccacagatgatgtggacaagcctggggataagtgccctgcggtattgacacttgaggggcgcgactactgacagatgaggggcgcgatccttgacacttgaggggcagagtgctgacagatgaggggcgcacctattgacatttgaggggctgtccacaggcagaaaatccagcatttgcaagggtttccgcccgtttttcggccaccgctaacctgtcttttaacctgcttttaaaccaatatttataaaccttgtttttaaccagggctgcgccctgtgcgcgtgaccgcgcacgccgaaggggggtgcccccccttctcgaaccctcccggtcgagtgagcgaggaagcaccagggaacagcacttatatattctgcttacacacgatgcctgaaaaaacttcccttggggttatccacttatccacggggatatttttataattattttttttatagtttttagatcttcttttttagagcgccttgtaggcctttatccatgctggttctagagaaggtgttgtgacaaattgccctttcagtgtgacaaatcaccctcaaatgacagtcctgtctgtgacaaattgcccttaaccctgtgacaaattgccctcagaagaagctgttttttcacaaagttatccctgcttattgactcttttttatttagtgtgacaatctaaaaacttgtcacacttcacatggatctgtcatggcggaaacagcggttatcaatcacaagaaacgtaaaaatagcccgcgaatcgtccagtcaaacgacctcactgaggcggcatatagtctctcccgggatcaaaaacgtatgctgtatctgttcgttgaccagatcagaaaatctgatggcaccctacaggaacatgacggtatctgcgagatccatgttgctaaatatgctgaaatattcggattgacctctgcggaagccagtaaggatatacggcaggcattgaagagtttcgcggggaaggaagtggttttttatcgccctgaagaggatgccggcgatgaaaaaggctatgaatcttttccttggtttatcaaacgtgcgcacagtccatccagagggctttacagtgtacatatcaacccatatctcattcccttctttatcgggttacagaaccggtttacgcagtttcggcttagtgaaacaaaagaaatcaccaatccgtatgccatgcgtttatacgaatccctgtgtcagtatcgtaagccggatggctcaggcatcgtctctctgaaaatcgactggatcatagagcgttaccagctgcctcaaagttaccagcgtatgcctgacttccgccgccgcttcctgcaggtctgtgttaatgagatcaacagcagaactccaatgcgcctctcatacattgagaaaaagaaaggccgccagacgactcatatcgtattttccttccgcgatatcacttccatgacgacaggatagtctgagggttatctgtcacagatttgagggtggttcgtcacatttgttctgacctactgagggtaatttgtcacagttttgctgtttccttcagcctgcatggattttctcatactttttgaactgtaatttttaaggaagccaaatttgagggcagtttgtcacagttgatttccttctctttcccttcgtcatgtgacctgatatcgggggttagttcgtcatcattgatgagggttgattatcacagtttattactctgaattggctatccgcgtgtgtacctctacctggagtttttcccacggtggatatttcttcttgcgctgagcgtaagagctatctgacagaacagttcttctttgcttcctcgccagttcgctcgctatgctcggttacacggctgcggcg

SEQ ID NO: 18 - DNA, 35283 bp, Artificial Sequence
  Clone pCCI-4K-SARS-CoV-2-WDDWD. Based on SARS-CoV-2.
gatgtgctgcaaggcgattaagttgggtaacgccagggttttcccagtcacgacgttgtaaaacgacggccagtgaattgtaatacgactcactatagggcgaattctagttattaatagtaatcaattacggggtcattagttcatagcccatatatggagttccgcgttacataacttacggtaaatggcccgcctggctgaccgcccaacgacccccgcccattgacgtcaataatgacgtatgttcccatagtaacgccaatagggactttccattgacgtcaatgggtggagtatttacggtaaactgcccacttggcagtacatcaagtgtatcatatgccaagtacgccccctattgacgtcaatgacggtaaatggcccgcctggcattatgcccagtacatgaccttatgggactttcctacttggcagtacatctacgtattagtcatcgctattaccatggtgatgcggttttggcagtacatcaatgggcgtggatagcggtttgactcacggggatttccaagtctccaccccattgacgtcaatgggagtttgttttggcaccaaaatcaacgggactttccaaaatgtcgtaacaactccgccccattgacgcaaatgggcggtaggcgtgtacggtgggaggtctatataagcagagctggtttagtgaaccgtattaaaggtttataccttcccaggtaacaaaccaaccaactttcgatctcttgtagatctgttctctaaacgaactttaaaatctgtgtggctgtcactcggctgcatgcttagtgcactcacgcagtataattaataactaattactgtcgttgacaggacacgagtaactcgtctatcttctgcaggctgcttacggtttcgtccgtgttgcagccgatcatcagcacatctaggtttcgtccgggtgtgaccgaaaggtaagatggagagccttgtccctggtttcaacgagaaaacacacgtccaactcagtttgcctgttttacaggttcgcgacgtgctcgtacgtggctttggagactccgtggaggaggtcttatcagaggcacgtcaacatcttaaagatggcacttgtggcttagtagaagttgaaaaaggcgttttgcctcaacttgaacagccctatgtgttcatcaaacgttcggatgctcgaactgcacctcatggtcatgttatggttgagctggtagcagaactcgaaggcattcagtacggtcgtagtggtgagacacttggtgtccttgtccctcatgtgggcgaaataccagtggcttaccgcaaggttcttcttcgtaagaacggtaataaaggagctggtggccatagttacggcgccgatctaaagtcatttgacttaggcgacgagcttggcactgatccttatgaagattttcaagaaaactggaacactaaacatagcagtggtgttacccgtgaactcatgcgtgagcttaacggaggggcatacactcgctatgtcgataacaacttctgtggccctgatggctaccctcttgagtgcattaaagaccttctagcacgtgctggtaaagcttcatgcactttgtccgaacaactggactttattgacactaagaggggtgtatactgctgccgtgaacatgagcatgaaattgcttggtacacggaacgttctgaaaagagctatgaattgcagacaccttttgaaattaaattggcaaagaaatttgacaccttcaatggggaatgtccaaattttgtatttcccttaaattccataatcaagactattcaaccaagggttgaaaagaaaaagcttgatggctttatgggtagaattcgatctgtctatccagttgcgtcaccaaatgaatgcaaccaaatgtgcctttcaactctcatgaagtgtgatcattgtggtgaaacttcatggcagacgggcgattttgttaaagccacttgcgaattttgtggcactgagaatttgactaaagaaggtgccactacttgtggttacttaccccaaaatgctgttgttaaaatttattgtccagcatgtcacaattcagaagtaggacctgagcatagtcttgccgaataccataatgaatctggcttgaaaaccattcttcgtaagggtggtcgcactattgcctttggaggctgtgtgttctcttatgttggttgccataacaagtgtgcctattgggtcccacgtgctagcgctaacataggttgtaaccatacaggtgttgttggagaaggttccgaaggtcttaatgacaaccttcttgaaatactccaaaaagagaaagtcaacatcaatattgttggtgactttaaacttaatgaagagatcgccattattttggcatctttttctgcttccacaagtgcttttgtggaaactgtgaaaggtttggattataaagcattcaaacaaattgttgaatcctgtggtaattttaaagttacaaaaggaaaagctaaaaaaggtgcctggaatattggtgaacagaaatcaatactgagtcctctttatgcatttgcatcagaggctgctcgtgttgtacgatcaattttctcccgcactcttgaaactgctcaaaattctgtgcgtgttttacagaaggccgctataacaatactagatggaatttcacagtattcactgagactcattgatgctatgatgttcacatctgatttggctactaacaatctagttgtaatggcctacattacaggtggtgttgttcagttgacttcgcagtggctaactaacatctttggcactgtttatgaaaaactcaaacccgtccttgattggcttgaagagaagtttaaggaaggtgtagagtttcttagagacggttgggaaattgttaaatttatctcaacctgtgcttgtgaaattgtcggtggacaaattgtcacctgtgcaaaggaaattaaggagagtgttcagacattctttaagcttgtaaataaatttttggctttgtgtgctgactctatcattattggtggagctaaacttaaagccttgaatttaggtgaaacatttgtcacgcactcaaagggattgtacagaaagtgtgttaaatccagagaagaaactggcctactcatgcctctaaaagccccaaaagaaattatcttcttagagggagaaacacttcccacagaagtgttaacagaggaagttgtcttgaaaactggtgatttacaaccattagaacaacctactagtgaagctgttgaagctccattggttggtacaccagtttgtattaacgggcttatgttgctcgaaatcaaagacacagaaaagtactgtgcccttgcacctaatatgatggtaacaaacaataccttcacactcaaaggcggtgcaccaacaaaggttacttttggtgatgacactgtgatagaagtgcaaggttacaagagtgtgaatatcacttttgaacttgatgaaaggattgataaagtacttaatgagaagtgctctgcctatacagttgaactcggtacagaagtaaatgagttcgcctgtgttgtggcagatgctgtcataaaaactttgcaaccagtatctgaattacttacaccactgggcattgatttagatgagtggagtatggctacatactacttatttgatgagtctggtgagtttaaattggcttcacatatgtattgttctttctaccctccagatgaggatgaagaagaaggtgattgtgaagaagaagagtttgagccatcaactcaatatgagtatggtactgaagatgattaccaaggtaaacctttggaatttggtgccacttctgctgctcttcaacctgaagaagagcaagaagaagattggttagatgatgatagtcaacaaactgttggtcaacaagacggcagtgaggacaatcagacaactactattcaaacaattgttgaggttcaacctcaattagagatggaacttacaccagttgttcagactattgaagtgaatagttttagtggttatttaaaacttactgacaatgtatacattaaaaatgcagacattgtggaagaagctaaaaaggtaaaaccaacagtggttgttaatgcagccaatgtttaccttaaacatggaggaggtgttgcaggagccttaaataaggctactaacaatgccatgcaagttgaatctgatgattacatagctactaatggaccacttaaagtgggtggtagttgtgttttaagcggacacaatcttgctaaacactgtcttcatgttgtcggcccaaatgttaacaaaggtgaagacattcaacttcttaagagtgcttatgaaaattttaatcagcacgaagttctacttgcaccattattatcagctggtatttttggtgctgaccctatacattctttaagagtttgtgtagatactgttcgcacaaatgtctacttagctgtctttgataaaaatctctatgacaaacttgtttcaagctttttggaaatgaagagtgaaaagcaagttgaacaaaagatcgctgagattcctaaagaggaagttaagccatttataactgaaagtaaaccttcagttgaacagagaaaacaagatgataagaaaatcaaagcttgtgttgaagaagttacaacaactctggaagaaactaagttcctcacagaaaacttgttactttatattgacattaatggcaatcttcatccagattctgccactcttgttagtgacattgacatcactttcttaaagaaagatgctccatatatagtgggtgatgttgttcaagagggtgttttaactgctgtggttatacctactaaaaaggctggtggcactactgaaatgctagcgaaagctttgagaaaagtgccaacagacaattatataaccacttacccgggtcaaggtttaaatggttatacggtagaagaagcgaaaacggtactaaaaaaatgtaaatcggcgttttatatactaccgtcgataatatcgaatgaaaaacaagaaatactaggtacggtatcgtggaatttacgtgaaatgctagcgcatgcggaagaaacacgtaaattaatgccggtatgtgtagaaacgaaagcgatagtatcgacgatacaacgtaaatataaaggtataaaaatacaagaaggtgtagtagattatggtgcgcgtttttatttttatacgtcgaaaacgacggtagcgtcgctaataaatacgctaaatgatctaaatgaaacgctagtaacgatgccgctaggttatgtaacgcatggtttaaatttagaagaagcggcgcgttatatgcgttcgctaaaagtaccggcgacggtatcggtatcgtcgccggatgcggtaacggcgtataatggttatctaacgtcgtcgtcgaaaacgccggaagaacattttatagaaacgatatcgctagcgggttcgtataaagattggtcgtattcgggtcaatcgacgcaactaggtatagaatttctaaaacgtggtgataaatcggtatattatacgtcgaatccgacgacgtttcatctagatggtgaagtaataacgtttgataatctaaaaacgctactatcgttacgtgaagtacgtacgataaaagtatttacgacggtagataatataaatctacatacgcaagtagtagatatgtcgatgacatatggacaacaatttggtccgacgtatttagatggtgcggatgttacgaaaataaaaccgcataattcgcatgaaggtaaaacgttttatgtattaccgaatgatgatacgctacgtgtagaagcgtttgaatattatcatacgactgatccgtcgtttctaggtcgttatatgtcggcgttaaatcatacgaaaaaatggaaatatccgcaagtaaatggtttaacgtcgataaaatgggcggataataattgttatctagcgacggcgttattaacgctacaacaaatagaattaaaatttaatccgccggcgctacaagatgcgtattatcgtgcgcgtgcgggtgaagcggcgaatttttgtgcgctaatattagcgtattgtaataaaacggtaggtgaattaggtgatgtacgtgaaacgatgtcgtatttatttcaacatgcgaatttagattcgtgtaaacgtgtattaaatgtagtatgtaaaacgtgtggtcaacaacaaacgacgctaaaaggtgtagaagcggtaatgtatatgggtacgctatcgtatgaacaatttaaaaaaggtgtacaaataccgtgtacgtgtggtaaacaagcgacgaaatatctagtacaacaagaatcgccgtttgtaatgatgtcggcgccgccggcgcaatatgaactaaaacatggtacgtttacgtgtgcgtcggaatatacgggtaattatcaatgtggtcattataaacatataacgtcgaaagaaacgttatattgtatagatggtgcgttacttacgaaatcgtcggaatataaaggtccgataacggatgtattttataaagaaaattcgtatacgacgacgataaaaccggtaacgtataaattagatggtgtagtatgtacggaaatagatccgaaattagataattattataaaaaagataattcgtattttacggaacaaccgatagatctagtaccgaatcaaccatatccgaatgcgtcgtttgataattttaaatttgtatgtgataatataaaatttgcggatgatttaaatcaattaacgggttataaaaaaccggcgtcgcgtgaactaaaagtaacgttttttccggatttaaatggtgatgtagtagcgatagattataaacattatacgccgtcgtttaaaaaaggtgcgaaattattacataaaccgatagtatggcatgtaaataatgcgacgaataaagcgacgtataaaccgaatacgtggtgtatacggtgtctatggagcacgaaaccggtagaaacgtcgaattcgtttgatgtactaaaatcggaagatgcgcaaggtatggataatctagcgtgtgaagatctaaaaccggtatcggaagaagtagtagaaaatccgacgatacaaaaagatgtactggaatgtaatgtaaaaacgacggaagtagtaggtgatataatactaaaaccggctaataattcgttaaaaataacggaagaagtaggtcatacggatctaatggcggcgtatgtagataattcgtcgctaacgataaaaaaaccgaatgaattatcgcgtgtattaggtttaaaaacgctagcgacgcatggtttagctgctgtaaattcggtaccgtgggatacgatagcgaattatgcgaaaccgtttctaaataaagtagtatcgacgacgacgaatatagtaacgcgatgtttaaatcgtgtatgtacgaattatatgccgtatttttttacgttattactacaattatgtacgtttacgcgatcgacgaattcgcgtataaaagcgtcgatgccgacgacgatagcgaaaaatacggtaaaatcggtaggtaaattttgtctagaagcgtcgtttaattatttaaaatcgccgaatttttctaaactaataaatataataatatggtttttactattatcggtatgcctaggttcgttaatatattcgacggcggcgttaggtgtattaatgtcgaatttaggtatgccgtcgtattgtacgggttatcgtgaaggttatttaaattcgacgaatgtaacgatagcgacgtattgtacgggttcgataccgtgttcggtatgtctatcgggtttagattcgttagatacgtatccgtcgttagaaacgatacaaataacgatatcgtcgtttaaatgggatttaacggcgtttggtttagtagcggaatggtttttagcgtatatactatttacgcgatttttttatgtactaggtttagcggcgataatgcaattatttttttcgtattttgcggtacattttatttcgaattcgtggctaatgtggttaataataaatctagtacaaatggcgccgatatcggcgatggtacgtatgtatatattttttgcgtcgttttattatgtatggaaatcgtatgtacatgtagtagatggttgtaattcgtcgacgtgtatgatgtgttataaacgtaatcgtgcgacgcgagtagaatgtacgacgatagtaaatggtgtacgtcgttcgttttatgtatatgcgaatggtggtaaaggtttttgtaaactacataattggaattgtgtaaattgtgatacgttttgtgcgggttcgacgtttatatcggatgaagtagcgcgtgatttatcgctacaatttaaacgtccgataaatccgacggatcaatcgtcgtatatagtagattcggtaacggtaaaaaatggttcgatacatctatattttgataaagcgggtcaaaaaacgtatgaacgtcattcgctatcgcattttgtaaatttagataatctacgtgcgaataatacgaaaggttcgttaccgataaatgtaatagtatttgatggtaaatcgaaatgtgaagaatcgtcggcgaaatcggcgtcggtatattattcgcaactaatgtgtcaaccgatactattactagatcaagcgttagtatcggatgtaggtgattcggcggaagtagcggtaaaaatgtttgatgcgtatgtaaatacgttttcgtcgacgtttaatgtaccgatggaaaaactaaaaacgctagtagcgacggcggaagcggaactagcgaaaaatgtatctttagataatgtattatcgacgtttatatcggcggcgcgtcaaggttttgtagattcggatgtagaaacgaaagatgtagtagaatgtctaaaattatcgcatcaatcggatatagaagtaacgggtgattcgtgtaataattatatgctaacgtataataaagtagaaaatatgacgccgcgtgatctaggtgcgtgtatagattgttcggcgcgtcatataaatgcgcaagtagcgaaatcgcataatatagcgttaatatggaatgtaaaagattttatgtcgttatcggaacaactacgtaaacaaatacgttcggcggcgaaaaaaaataatttaccgtttaaattaacgtgtgcgacgacgcgacaagtagtaaatgtagtaacgacgaaaatagcgctaaaaggtggtaaaatagtaaataattggttaaaacaattaattaaagttacacttgtgttcctttttgttgctgctattttctatttaataacacctgttcatgtcatgtctaaacatactgacttttcaagtgaaatcataggatacaaggctattgatggtggtgtcactcgtgacatagcatctacagatacttgttttgctaacaaacatgctgattttgacacatggtttagccagcgtggtggtagttatactaatgacaaagcttgcccattgattgctgcagtcataacaagagaagtgggttttgtcgtgcctggtttgcctggcacgatattacgcacaactaatggtgactttttgcatttcttacctagagtttttagtgcagttggtaacatctgttacacaccatcaaaacttatagagtacactgactttgcaacatcagcttgtgttttggctgctgaatgtacaatttttaaagatgcttctggtaagccagtaccatattgttatgataccaatgtactagaaggttctgttgcttatgaaagtttacgccctgacacacgttatgtgctcatggatggctctattattcaatttcctaacacctaccttgaaggttctgttagagtggtaacaacttttgattctgagtactgtaggcacggcacttgtgaaagatcagaagctggtgtttgtgtatctactagtggtagatgggtacttaacaatgattattacagatctttaccaggagttttctgtggtgtagatgctgtaaatttacttactaatatgtttacaccactaattcaacctattggtgctttggacatatcagcatctatagtagctggtggtattgtagctatcgtagtaacatgccttgcctactattttatgaggtttagaagagcttttggtgaatacagtcatgtagttgcctttaatactttactattccttatgtcattcactgtactctgtttaacaccagtttactcattcttacctggtgtttattctgttatttacttgtacttgacattttatcttactaatgatgtttcttttttagcacatattcagtggatggttatgttcacacctttagtacctttctggataacaattgcttatatcatttgtatttccacaaagcatttctattggttctttagtaattacctaaagagacgtgtagtctttaatggtgtttcctttagtacttttgaagaagctgcgctgtgcacctttttgttaaataaagaaatgtatctaaagttgcgtagtgatgtgctattacctcttacgcaatataatagatacttagctctttataataagtacaagtattttagtggagcaatggatacaactagctacagagaagctgcttgttgtcatctcgcaaaggctctcaatgacttcagtaactcaggttctgatgttctttaccaaccaccacaaacctctatcacctcagctgttttgcagagtggttttagaaaaatggcattcccatctggtaaagttgagggttgtatggtacaagtaacttgtggtacaactacacttaacggtctttggcttgatgacgtagtttactgtccaagacatgtgatctgcacctctgaagacatgcttaaccctaattatgaagatttactcattcgtaagtctaatcataatttcttggtacaggctggtaatgttcaactcagggttattggacattctatgcaaaattgtgtacttaagcttaaggttgatacagccaatcctaagacacctaagtataagtttgttcgcattcaaccaggacagactttttcagtgttagcttgttacaatggttcaccatctggtgtttaccaatgtgctatgaggcccaatttcactattaagggttcattccttaatggttcatgtggtagtgttggttttaacatagattatgactgtgtctctttttgttacatgcaccatatggaattaccaactggagttcatgctggcacagacttagaaggtaacttttatggaccttttgttgacaggcaaacagcacaagcagctggtacggacacaactattacagttaatgttttagcttggttgtacgctgctgttataaatggagacaggtggtttctcaatcgatttaccacaactcttaatgactttaaccttgtggctatgaagtacaattatgaacctctaacacaagaccatgttgacatactaggacctctttctgctcaaactggaattgccgttttagatatgtgtgcttcattaaaagaattactgcaaaatggtatgaatggacgtaccatattgggtagtgctttattagaagatgaatttacaccttttgatgttgttagacaatgctcaggtgttactttccaaagtgcagtgaaaagaacaatcaagggtacacaccactggttgttactcacaattttgacttcacttttagttttagtccagagtactcaatggtctttgttcttttttttgtatgaaaatgcctttttaccttttgctatgggtattattgctatgtctgcttttgcaatgatgtttgtcaaacataagcatgcgtttctatgtttatttttattaccgtcgctagcgacggtagcgtattttaatatggtatatatgccggcgtcgtgggtaatgcgtataatgacgtggttagatatggtagatacgtcgttatcgggttttaaactaaaagattgtgtaatgtatgcgtcggcggtagtattactaatactaatgacggcgcgtacggtatatgatgatggtgcgcgtcgtgtatggacgctaatgaatgtattaacgctagtatataaagtatattatgggaatgcgttagatcaagcgatatcgatgtgggcgctaataatatcggtaacgtcgaattattcgggtgtagtaacgacggtaatgtttttagcgcgtggtatagtatttatgtgtgtagaatattgtccgatattttttataacgggtaatacactacaatgtataatgctagtatattgttttttaggttatttttgtacgtgttattttggtctattttgtttactaaatcgttattttcgtctaacactaggtgtatatgattatttagtatcgacgcaagaatttcgttatatgaattcgcaaggtctactaccgccgaaaaattcgatagatgcgtttaaactaaatataaaattattaggtgtaggtggtaaaccgtgtataaaagtagcgacggtacaatcgaaaatgtcggatgtaaaatgtacatcggtagtattactatcggtattacaacaactacgtgtagaatcgtcgtcgaaattatgggcgcaatgtgtacaattacataatgatatactattagcgaaagatacgacggaagcgtttgaaaaaatggtatcgctactatcggtattactatcgatgcaaggtgcggtagatataaataaactatgtgaagaaatgctagataatcgtgcgacgttacaagcgatagcgtcggaattttcgtcgctaccgtcgtatgcggcgtttgcgacggcgcaagaagcgtatgaacaagcggtagcgaatggtgattcggaagtagtactaaaaaaattaaaaaaatcgttaaatgtagcgaaatcggaatttgatcgtgatgcggcgatgcaacgtaaattagaaaaaatggcggatcaagcgatgacgcaaatgtataaacaagcgcgttcggaagataaacgtgcgaaagtaacgtcggcgatgcaaacgatgctatttacgatgctacgtaaattagataatgatgcgctaaataatataataaataatgcgcgtgatggttgtgtaccgttaaatataataccgctaacgacggcggcgaaactaatggtagtaataccggattataatacatataaaaatacgtgtgatggtacgacgtttacgtatgcgtcggcgttatgggaaatacaacaagtagtagatgcggattcgaaaatagtacaactatcggaaatatcgatggataattcgccgaatttagcgtggccgctaatagtaacggcgttacgtgcgaattcggcggtaaaattacaaaataatgaactatcgccggtagcgctacgacagatgtcttgtgctgccggtactacacaaactgcttgcactgatgacaatgcgttagcttactacaacacaacaaagggaggtaggtttgtacttgcactgttatccgatttacaggatttgaaatgggctagattccctaagagtgatggaactggtactatctatacagaactggaaccaccttgtaggtttgttacagacacacctaaaggtcctaaagtgaagtatttatactttattaaaggattaaacaacctaaatagaggtatggtacttggtagtttagctgccacagtacgtctacaagctggtaatgcaacagaagtgcctgccaattcaactgtattatctttctgtgcttttgctgtagatgctgctaaagcttacaaagattatctagctagtgggggacaaccaatcactaattgtgttaagatgttgtgtacacacactggtactggtcaggcaataacagttacaccggaagccaatatggatcaagaatcctttggtggtgcatcgtgttgtctgtactgccgttgccacatagatcatccaaatcctaaaggattttgtgacttaaaaggtaagtatgtacaaatacctacaacttgtgctaatgaccctgtgggttttacacttaaaaacacagtctgtaccgtctgcggtatgtggaaaggttatggctgtagttgtgatcaactccgcgaacccatgcttcagtcagctgatgcacaatcgtttttaaacgggtttgcggtgtaagtgcagcccgtcttacaccgtgcggcacaggcactagtactgatgtcgtatacagggcttttgacatctacaatgataaagtagctggttttgctaaattcctaaaaactaattgttgtcgcttccaagaaaaggacgaagatgacaatttaattgattcttactttgtagttaagagacacactttctctaactaccaacatgaagaaacaatttataatttacttaaggattgtccagctgttgctaaacatgacttctttaagtttagaatagacggtgacatggtaccacatatatcacgtcaacgtcttactaaatacacaatggcagacctcgtctatgctttaaggcattttgatgaaggtaattgtgacacattaaaagaaatacttgtcacatacaattgttgtgatgatgattatttcaataaaaaggactggtatgattttgtagaaaacccagatatattacgcgtatacgccaacttaggtgaacgtgtacgccaagctttgttaaaaacagtacaattctgtgatgccatgcgaaatgctggtattgttggtgtactgacattagataatcaagatctcaatggtaactggtatgatttcggtgatttcatacaaaccacgccaggtagtggagttcctgttgtagattcttattattcattgttaatgcctatattaaccttgaccagggctttaactgcagagtcacatgttgacactgacttaacaaagccttacattaagtgggatttgttaaaatatgacttcacggaagagaggttaaaactctttgaccgttattttaaatattgggatcagacataccacccaaattgtgttaactgtttggatgacagatgcattctgcattgtgcaaactttaatgttttattctctacagtgttcccacctacaagttttggaccactagtgagaaaaatatttgttgatggtgttccatttgtagtttcaactggataccacttcagagagctaggtgttgtacataatcaggatgtaaacttacatagctctagacttagttttaaggaattacttgtgtatgctgctgaccctgctatgcacgctgcttctggtaatctattactagataaacgcactacgtgcttttcagtagctgcacttactaacaatgttgcttttcaaactgtcaaacccggtaattttaacaaagacttctatgactttgctgtgtctaagggtttctttaaggaaggaagttctgttgaattaaaacacttcttctttgctcaggatggtaatgctgctatcagcgattatgactactatcgttataatctaccaacaatgtgtgatatcagacaactactatttgtagttgaagttgttgataagtactttgattgttacgatggtggctgtattaatgctaaccaagtcatcgtcaacaacctagacaaatcagctggttttccatttaataaatggggtaaggctagactttattatgattcaatgagttatgaggatcaagatgcacttttcgcatatacaaaacgtaatgtcatccctactataactcaaatgaatcttaagtatgccattagtgcaaagaatagagctcgcaccgtagctggtgtctctatctgtagtactatgaccaatagacagtttcatcaaaaattattgaaatcaatagccgccactagaggagctactgtagtaattggaacaagcaaattctatggtggttggcacaacatgttaaaaactgtttatagtgatgtagaaaaccctcaccttatgggttgggattatcctaaatgtgatagagccatgcctaacatgcttagaattatggcctcacttgttcttgctcgcaaacatacaacgtgttgtagcttgtcacaccgtttctatagattagctaatgagtgtgctcaagtattgagtgaaatggtcatgtgtggcggttcactatatgttaaaccaggtggaacctcatcaggagatgccacaactgcttatgctaatagtgtttttaacatttgtcaagctgtcacggccaatgttaatgcacttttatctactgatggtaacaaaattgccgataagtatgtccgcaatttacaacacagactttatgagtgtctctatagaaatagagatgttgacacagactttgtgaatgagttttacgcatatttgcgtaaacatttctcaatgatgatactctctgacgatgctgttgtgtgtttcaatagcacttatgcatctcaaggtctagtggctagcataaagaactttaagtcagttctttattatcaaaacaatgtttttatgtctgaagcaaaatgttggactgagactgaccttactaaaggacctcatgaattttgctctcaacatacaatgctagttaaacagggtgatgattatgtgtaccttccttacccagatccatcaagaatcctaggggccggctgttttgtagatgatatcgtaaaaacagatggtacacttatgattgaacggttcgtgtctttagctatagatgcttacccacttactaaacatcctaatcaggagtatgctgatgtctttcatttgtacttacaatacataagaaagctacatgatgagttaacaggacacatgttagacatgtattctgttatgcttactaatgataacacttcaaggtattgggaacctgagttttatgaggctatgtacacaccgcatacagtcttacaggctgttggggcttgtgttctttgcaattcacagacttcattaagatgtggtgcttgcatacgtagaccattcttatgttgtaaatgctgttacgaccatgtcatatcaacatcacataaattagtcttgtctgttaatccgtatgtttgcaatgctccaggttgtgatgtcacagatgtgactcaactttacttaggaggtatgagctattattgtaaatcacataaaccacccattagttttccattgtgtgctaatggacaagtttttggtttatataaaaatacatgtgttggtagcgataatgttactgactttaatgcaattgcaacatgtgactggacaaatgctggtgattacattttagctaacacctgtactgaaagactcaagctttttgcagcagaaacgctcaaagctactgaggagacatttaaactgtcttatggtattgctactgtacgtgaagtgctgtctgacagagaattacatctttcatgggaagttggtaaacctagaccaccacttaaccgaaattatgtctttactggttatcgtgtaactaaaaacagtaaagtacaaataggagagtacacctttgaaaaaggtgactatggtgatgctgttgtttaccgaggtacaacaacttacaaattaaatgttggtgattattttgtgctgacatcacatacagtaatgccattaagtgcacctacactagtgccacaagagcactatgttagaattactggcttatacccaacactcaatatctcagatgagttttctagcaatgttgcaaattatcaaaaggttggtatgcaaaagtattctacactccagggaccacctggtactggtaagagtcattttgctattggcctagctctctactacccttctgctcgcatagtgtatacagcttgctctcatgccgctgttgatgcactatgtgagaaggcattaaaatatttgcctatagataaatgtagtagaattatacctgcacgtgctcgtgtagagtgttttgataaattcaaagtgaattcaacattagaacagtatgtcttttgtactgtaaatgcattgcctgagacgacagcagatatagttgtctttgatgaaatttcaatggccacaaattatgatttgagtgttgtcaatgccagattacgtgctaagcactatgtgtacattggcgaccctgctcaattacctgcaccacgcacattgctaactaagggcacactagaaccagaatatttcaattcagtgtgtagacttatgaaaactataggtccagacatgttcctcggaacttgtcggcgttgtcctgctgaaattgttgacactgtgagtgctttggtttatgataataagcttaaagcacataaagacaaatcagctcaatgctttaaaatgttttataagggtgttatcacgcatgatgtttcatctgcaattaacaggccacaaataggcgtggtaagagaattccttacacgtaaccctgcttggagaaaagctgtctttatttcaccttataattcacagaatgctgtagcctcaaagattttgggactaccaactcaaactgttgattcatcacagggctcagaatatgactatgtcatattcactcaaaccactgaaacagctcactcttgtaatgtaaacagatttaatgttgctattaccagagcaaaagtaggcatactttgcataatgtctgatagagacctttatgacaagttgcaatttacaagtcttgaaattccacgtaggaatgtggcaactttacaagctgaaaatgtaacaggactctttaaagattgtagtaaggtaatcactgggttacatcctacacaggcacctacacacctcagtgttgacactaaattcaaaactgaaggtttatgtgttgacatacctggcatacctaaggacatgacctatagaagactcatctctatgatgggttttaaaatgaattatcaagttaatggttaccctaacatgtttatcacccgcgaagaagctataagacatgtacgtgcatggattggcttcgatgtcgaggggtgtcatgctactagagaagctgttggtaccaatttacctttacagctaggtttttctacaggtgttaacctagttgctgtacctacaggttatgttgatacacctaataatacagatttttccagagttagtgctaaaccaccgcctggagatcaatttaaacacctcataccacttatgtacaaaggacttccttggaatgtagtgcgtataaagattgtacaaatgttaagtgacacacttaaaaatctctctgacagagtcgtatttgtcttatgggcacatggctttgagttgacatctatgaagtattttgtgaaaataggacctgagcgcacctgttgtctatgtgatagacgtgccacatgcttttccactgcttcagacacttatgcctgttggcatcattctattggatttgattacgtctataatccgtttatgattgatgttcaacaatggggttttacaggtaacctacaaagcaaccatgatctgtattgtcaagtccatggtaatgcacatgtagctagttgtgatgcaatcatgactaggtgtctagctgtccacgagtgctttgttaagcgtgttgactggactattgaatatcctataattggtgatgaactgaagattaatgcggcttgtagaaaggttcaacacatggttgttaaagctgcattattagcagacaaattcccagttcttcacgacattggtaaccctaaagctattaagtgtgtacctcaagctgatgtagaatggaagttctatgatgcacagccttgtagtgacaaagcttataaaatagaagaattattctattcttatgccacacattctgacaaattcacagatggtgtatgcctattttggaattgcaatgtcgatagatatcctgctaattccattgtttgtagatttgacactagagtgctatctaaccttaacttgcctggttgtgatggtggcagtttgtatgtaaataaacatgcattccacacaccagcttttgataaaagtgcttttgttaatttaaaacaattaccatttttctattactctgacagtccatgtgagtctcatggaaaacaagtagtgtcagatatagattatgtaccactaaagtctgctacgtgtataacacgttgcaatttaggtggtgctgtctgtagacatcatgctaatgagtacagattgtatctcgatgcttataacatgatgatctcagctggctttagcttgtgggtttacaaacaatttgatacttataacctctggaacacttttacaagacttcagagtttagaaaatgtggcttttaatgttgtaaataagggacactttgatggacaacagggtgaagtaccagtttctatcattaataacactgtttacacaaaagttgatggtgttgatgtagaattgtttgaaaataaaacaacattacctgttaatgtagcatttgagctttgggctaagcgcaacattaaaccagtaccagaggtgaaaatactcaataatttgggtgtggacattgctgctaatactgtgatctgggactacaaaagagatgctccagcacatatatctactattggtgtttgttctatgactgacatagccaagaaaccaactgaaacgatttgtgcaccactcactgtcttttttgatggtagagttgatggtcaagtagacttatttagaaatgcccgtaatggtgttcttattacagaaggtagtgttaaaggtttacaaccatctgtaggtcccaaacaagctagtcttaatggagtcacattaattggagaagccgtaaaaacacagttcaattattataagaaagttgatggtgttgtccaacaattacctgaaacttactttactcagagtagaaatttacaagaatttaaacccaggagtcaaatggaaattgatttcttagaattagctatggatgaattcattgaacggtataaattagaaggctatgccttcgaacatatcgtttatggagattttagtcatagtcagttaggtggtttacatctactgattggactagctaaacgttttaaggaatcaccttttgaattagaagattttattcctatggacagtacagttaaaaactatttcataacagatgcgcaaacaggttcatctaagtgtgtgtgttctgttattgatttattacttgatgattttgttgaaataataaaatcccaagatttatctgtagtttctaaggttgtcaaagtgactattgactatacagaaatttcatttatgctttggtgtaaagatggccatgtagaaacattttacccaaaattacaatctagtcaagcgtggcaaccgggtgttgctatgcctaatctttacaaaatgcaaagaatgctattagaaaagtgtgaccttcaaaattatggtgatagtgcaacattacctaaaggcataatgatgaatgtcgcaaaatatactcaactgtgtcaatatttaaacacattaacattagctgtaccctataatatgagagttatacattttggtgctggttctgataaaggagttgcaccaggtacagctgttttaagacagtggttgcctacgggtacgctgcttgtcgattcagatcttaatgactttgtctctgatgcagattcaactttgattggtgattgtgcaactgtacatacagctaataaatgggatctcattattagtgatatgtacgaccctaagactaaaaatgttacaaaagaaaatgactctaaagagggttttttcacttacatttgtgggtttatacaacaaaagctagctcttggaggttccgtggctataaagataacagaacattcttggaatgctgatctttataagctcatgggacacttcgcatggtggacagcctttgttactaatgtgaatgcgtcatcatctgaagcatttttaattggatgtaattatcttggcaaaccacgcgaacaaatagatggttatgtcatgcatgcaaattacatattttggaggaatacaaatccaattcagttgtcttcctattctttatttgacatgagtaaatttccccttaaattaaggggtactgctgttatgtctttaaaagaaggtcaaatcaatgatatgattttatctcttcttagtaaaggtagacttataattagagaaaacaacagagttgttatttctagtgatgttcttgttaacaactaaacgaacaatgtttgtttttcttgttttattgccactagtctctagtcagtgtgttaatcttacaaccagaactcaattaccccctgcatacactaattctttcacacgtggtgtttattaccctgacaaagttttcagatcctcagttttacattcaactcaggacttgttcttacctttcttttccaatgttacttggttccatgctatacatgtctctgggaccaatggtactaagaggtttgataaccctgtcctaccatttaatgatggtgtttattttgcttccactgagaagtctaacataataagaggctggatttttggtactactttagattcgaagacccagtccctacttattgttaataacgctactaatgttgttattaaagtctgtgaatttcaattttgtaatgatccatttttgggtgtttattaccacaaaaacaacaaaagttggatggaaagtgagttcagagtttattctagtgcgaataattgcacttttgaatatgtctctcagccttttcttatggaccttgaaggaaaacagggtaatttcaaaaatcttagggaatttgtgtttaagaatattgatggttattttaaaatatattctaagcacacgcctattaatttagtgcgtgatctcccccagggtttttcggctttagaaccattggtagatttgccaataggtattaacatcactaggtttcaaactttacttgctttacatagaagttatttgactcctggtgattcttcttcaggttggacagctggtgctgcagcttattatgtgggttatcttcaacctaggacttttctattaaaatataatgaaaatggaaccattacagatgctgtagactgtgcacttgaccctctctcagaaacaaagtgtacgttgaaatccttcactgtagaaaaaggaatctatcaaacttctaactttagagtccaaccaacagaatctattgttagatttcctaatattacaaacttgtgcccttttggtgaagtttttaacgccaccagatttgcatctgtttatgcttggaacaggaagagaatcagcaactgtgttgctgattattctgtcctatataattccgcatcattttccacttttaagtgttatggagtgtctcctactaaattaaatgatctctgctttactaatgtctatgcagattcatttgtaattagaggtgatgaagtcagacaaatcgctccagggcaaactggaaagattgctgattataattataaattaccagatgattttacaggctgcgttatagcttggaattctaacaatcttgattctaaggttggtggtaattataattacctgtatagattgtttaggaagtctaatctcaaaccttttgagagagatatttcaactgaaatctatcaggccggtagcacaccttgtaatggtgttgaaggttttaattgttactttcctttacaatcatatggtttccaacccactaatggtgttggttaccaaccatacagagtagtagtactttcttttgaacttctacatgcaccagcaactgtttgtggacctaaaaagtctactaatttggttaaaaacaaatgtgtcaatttcaacttcaatggtttaacaggcacaggtgttcttactgagtctaacaaaaagtttctgcctttccaacaatttggcagagacattgctgacactactgatgctgtccgtgatccacagacacttgagattcttgacattacaccatgttcttttggtggtgtcagtgttataacaccaggaacaaatacttctaaccaggttgctgttctttatcaggatgttaactgcacagaagtccctgttgctattcatgcagatcaacttactcctacttggcgtgtttattctacaggttctaatgtttttcaaacacgtgcaggctgtttaataggggctgaacatgtcaacaactcatatgagtgtgacatacccattggtgcaggtatatgcgctagttatcagactcagactaattctcctcggcgggcacgtagtgtagctagtcaatccatcattgcctacactatgtcacttggtgcagaaaattcagttgcttactctaataactctattgccatacccacaaattttactattagtgttaccacagaaattctaccagtgtctatgaccaagacatcagtagattgtacaatgtacatttgtggtgattcaactgaatgcagcaatcttttgttgcaatatggcagtttttgtacacaattaaaccgtgctttaactggaatagctgttgaacaagacaaaaacacccaagaagtttttgcacaagtcaaacaaatttacaaaacaccaccaattaaagattttggtggttttaatttttcacaaatattaccagatccatcaaaaccaagcaagaggtcatttattgaagatctacttttcaacaaagtgacacttgcagatgctggcttcatcaaacaatatggtgattgccttggtgatattgctgctagagacctcatttgtgcacaaaagtttaacggccttactgttttgccacctttgctcacagatgaaatgattgctcaatacacttctgcactgttagcgggtacaatcacttctggttggacctttggtgcaggtgctgcattacaaataccatttgctatgcaaatggcttataggtttaatggtattggagttacacagaatgttctctatgagaaccaaaaattgattgccaaccaatttaatagtgctattggcaaaattcaagactcactttcttccacagcaagtgcacttggaaaacttcaagatgtggtcaaccaaaatgcacaagctttaaacacgcttgttaaacaacttagctccaattttggtgcaatttcaagtgttttaaatgatatcctttcacgtcttgacaaagttgaggctgaagtgcaaattgataggttgatcacaggcagacttcaaagtttgcagacatatgtgactcaacaattaattagagctgcagaaatcagagcttctgctaatcttgctgctactaaaatgtcagagtgtgtacttggacaatcaaaaagagttgatttttgtggaaagggctatcatcttatgtccttccctcagtcagcacctcatggtgtagtcttcttgcatgtgacttatgtccctgcacaagaaaagaacttcacaactgctcctgccatttgtcatgatggaaaagcacactttcctcgtgaaggtgtctttgtttcaaatggcacacactggtttgtaacacaaaggaatttttatgaaccacaaatcattactacagacaacacatttgtgtctggtaactgtgatgttgtaataggaattgtcaacaacacagtttatgatcctttgcaacctgaattagactcattcaaggaggagttagataaatattttaagaatcatacatcaccagatgttgatttaggtgacatctctggcattaatgcttcagttgtaaacattcaaaaagaaattgaccgcctcaatgaggttgccaagaatttaaatgaatctctcatcgatctccaagaacttggaaagtatgagcagtatataaaatggccatggtacatttggctaggttttatagctggcttgattgccatagtaatggtgacaattatgctttgctgtatgaccagttgctgtagttgtctcaagggctgttgttcttgtggatcctgctgcaaatttgatgaagacgactctgagccagtgctcaaaggagtcaaattacattacacataaacgaacttatggatttgtttatgagaatcttcacaattggaactgtaactttgaagcaaggtgaaatcaaggatgctactccttcagattttgttcgcgctactgcaacgataccgatacaagcctcactccctttcggatggcttattgttggcgttgcacttcttgctgtttttcagagcgcttccaaaatcataaccctcaaaaagagatggcaactagcactctccaagggtgttcactttgtttgcaacttgctgttgttgtttgtaacagtttactcacaccttttgctcgttgctgctggccttgaagccccttttctctatctttatgctttagtctacttcttgcagagtataaactttgtaagaataataatgaggctttggctttgctggaaatgccgttccaaaaacccattactttatgatgccaactattttctttgctggcatactaattgttacgactattgtataccttacaatagtgtaacttcttcaattgtcattacttcaggtgatggcacaacaagtcctatttctgaacatgactaccagattggtggttatactgaaaaatgggaatctggagtaaaagactgtgttgtattacacagttacttcacttcagactattaccagctgtactcaactcaattgagtacagacactggtgttgaacatgttaccttcttcatctacaataaaattgttgatgagcctgaagaacatgtccaaattcacacaatcgacggttcatccggagttgttaatccagtaatggaaccaatttatgatgaaccgacgacgactactagcgtgcctttgtaagcacaagctgatgagtacgaacttatgtactcattcgtttcggaagagacaggtacgttaatagttaatagcgtacttctttttcttgctttcgtggtattcttgctagttacactagccatccttactgcgcttcgattgtgtgcgtactgctgcaatattgttaacgtgagtcttgtaaaaccttctttttacgtttactctcgtgttaaaaatctgaattcttctagagttcctgatcttctggtctaaacgaactaaatattatattagtttttctgtttggaactttaattttagccatggcagattccaacggtactattaccgttgaagagcttaaaaagctccttgaacaatggaacctagtaataggtttcctattccttacatggatttgtcttctacaatttgcctatgccaacaggaataggtttttgtatataattaagttaattttcctctggctgttatggccagtaactttagcttgttttgtgcttgctgctgtttacagaataaattggatcaccggtggaattgctatcgcaatggcttgtcttgtaggcttgatgtggctcagctacttcattgcttctttcagactgtttgcgcgtacgcgatccatgtggtcattcaatccagaaactaacattcttctcaacgtgccactccatggcactattctgaccagaccgcttctagaaagtgaactcgtaatcggagctgtgatccttcgtggacatcttcgtattgctggacaccatctaggacgctgtgacatcaaggacctgcctaaagaaatcactgttgctacatcacgaacgctttcttattacaaattgggagcttcgcagcgtgtagcaggtgactcaggttttgctgcatacagtcgctacaggattggcaactataaattaaacacagaccattccagtagcagtgacaatattgctttgcttgtacagtaagtgacaacagatgtttcatctcgttgactttcaggttactatagcagagatattactaattattatgaggacttttaaagtttccatttggaatcttgattacatcataaacctcataattaaaaatttatctaagtcactaactgagaataaatattctcaattagatgaagagcaaccaatggagattgattaaacgaacatgaaaattattcttttcttggcactgataacactcgctacttgtgagctttatcactaccaagagtgtgttagaggtacaacagtacttttaaaagaaccttgctcttctggaacatacgagggcaattcaccatttcatcctctagctgataacaaatttgcactgacttgctttagcactcaatttgcttttgcttgtcctgacggcgtaaaacacgtctatcagttacgtgccagatcagtttcacctaaactgttcatcagacaagaggaagttcaagaactttactctccaatttttcttattgttgcggcaatagtgtttataacactttgcttcacactcaaaagaaagacagaatgattgaactttcattaattgacttctatttgtgctttttagcctttctgctattccttgttttaattatgcttattatcttttggttctcacttgaactgcaagatcataatgaaacttgtcacgcctaaacgaacatgaaatttcttgttttcttaggaatcatcacaactgtagctgcatttcaccaagaatgtagtttacagtcatgtactcaacatcaaccatatgtagttgatgacccgtgtcctattcacttctattctaaatggtatattagagtaggagctagaaaatcagcacctttaattgaattgtgcgtggatgaggctggttctaaatcacccattcagtacatcgatatcggtaattatacagtttcctgtttaccttttacaattaattgccaggaacctaaattgggtagtcttgtagtgcgttgttcgttctatgaagactttttagagtatcatgacgttcgtgttgttttagatttcatctaaacgaacaaactaaaatgtctgataatggaccccaaaatcagcgaaatgcaccccgcattacgtttggtggaccctcagattcaactggcagtaaccagaatggagaacgcagtggggcgcgatcaaaacaacgtcggccccaaggtttacccaataatactgcgtcttggttcaccgctctcactcaacatggcaaggaagaccttaaattccctcgaggacaaggcgttccaattaacaccaatagcagtccagatgaccaaattggctactaccgaagagctaccagacgaattcgtggtggtgacggtaaaatgaaagatctcagtccaagatggtatttctactacctaggaactgggccagaagctggacttccctatggtgctaacaaagacggcatcatatgggttgcaactgagggagccttgaatacaccaaaagatcacattggcacccgcaatcctgctaacaatgctgcaatcgtgctacaacttcctcaaggaacaacattgccaaaaggcttctacgcagaagggagcagaggcggcagtcaagcctcttctcgttcctcatcacgtagtcgcaacagttcaagaaattcaactccaggcagcagtaggggaacttctcctgctagaatggctggcaatggcggtgatgctgctcttgctttgctgctgcttgacagattgaaccagcttgagagcaaaatgtctggtaaaggccaacaacaacaaggccaaactgtcactaagaaatctgctgctgaggcttctaagaagcctcggcaaaaacgtactgccactaaagcatacaatgtaacacaagctttcggcagacgtggtccagaacaaacccaaggaaattttggggaccaggaactaatcagacaaggaactgattacaaacattggccgcaaattgcacaatttgcccccagcgcttcagcgttcttcggaatgtcgcgcattggcatggaagtcacaccttcgggaacgtggttgacctacacaggtgccatcaaattggatgacaaagatccaaatttcaaagatcaagtcattttgctgaataagcatattgacgcatacaaaacattcccaccaacagagcctaaaaaggacaaaaagaagaaggctgatgaaactcaagccttaccgcagagacagaagaaacagcaaactgtgactcttcttcctgctgcagatttggatgatttctccaaacaattgcaacaatccatgagcagtgctgactcaactcaggcctaaactcatgcagaccacacaaggcagatgggctatataaacgttttcgcttttccgtttacgatatatagtctactcttgtgcagaatgaattctcgtaactacatagcacaagtagatgtagttaactttaatctcacatagcaatctttaatcagtgtgtaacattagggaggacttgaaagagccaccacattttcaccgaggccacgcggagtacgatcgagtgtacagtgaacaatgctagggagagctgcctatatggaagagccctaatgtgtaaaattaattttagtagtgctatccccatgtgattttaatagcttcttaggagaatgacaaaaaaaaaaaaaaaaaaaaaaaaaaaaaaaaaaaaaaaaaaaaaaaaaaaaaaaaaaagggtcggcatggcatctccacctcctcgcggtccgacctgggcatccgaaggaggacgcacgtccactcggatggctaagggagcagcacactggcggccgttactagggccgcgcccttcccaacagttgcgcagcctgaatggcgaatggagatccaatttttaagtgtataatgtgttaaactactgattctaattgtttgtgtattttagattcacagtcccaaggctcatttcaggcccctcagtcctcacagtctgttcatgatcataatcagccataccacatttgtagaggttttacttgctttaaaaaacctcccacacctccccctgaacctgaaacataaaatgaatgcaattgttgttgttaacttgtttattgcagcttataatggttacaaataaagcaatagcatcacaaatttcacaaataaagcatttttttcactgcattctagttgtggtttgtccaaactcatcaatgtatcttaaagcttgagtattctatagtctcacctaaatagcttggcgtaatcatggtcatagctgtttcctgtgtgaaattgttatccgctcacaattccacacaacatacgagccggaagcataaagtgtaaagcctggggtgcctaatgagtgagctaactcacattaattgcgttgcgctcactgcccgctttccagtcgggaaacctgtcgtgccagctgcattaatgaatcggccaacgcgaaccccttgcggccgcccgggccgtcgaccaattctcatgtttgacagcttatcatcgaatttctgccattcatccgcttattatcacttattcaggcgtagcaaccaggcgtttaagggcaccaataactgccttaaaaaaattacgccccgccctgccactcatcgcagtactgttgtaattcattaagcattctgccgacatggaagccatcacaaacggcatgatgaacctgaatcgccagcggcatcagcaccttgtcgccttgcgtataatatttgcccatggtgaaaacgggggcgaagaagttgtccatattggccacgtttaaatcaaaactggtgaaactcacccagggattggctgagacgaaaaacatattctcaataaaccctttagggaaataggccaggttttcaccgtaacacgccacatcttgcgaatatatgtgtagaaactgccggaaatcgtcgtggtattcactccagagcgatgaaaacgtttcagtttgctcatggaaaacggtgtaacaagggtgaacactatcccatatcaccagctcaccgtctttcattgccatacgaaattccggatgagcattcatcaggcgggcaagaatgtgaataaaggccggataaaacttgtgcttatttttctttacggtctttaaaaaggccgtaatatccagctgaacggtctggttataggtacattgagcaactgactgaaatgcctcaaaatgttctttacgatgccattgggatatatcaacggtggtatatccagtgatttttttctccattttagcttccttagctcctgaaaatctcgataactcaaaaaatacgcccggtagtgatcttatttcattatggtgaaagttggaacctcttacgtgccgatcaacgtctcattttcgccaaaagttggcccagggcttcccggtatcaacagggacaccaggatttatttattctgcgaagtgatcttccgtcacaggtatttattcgcgataagctcatggagcggcgtaaccgtcgcacaggaaggacagagaaagcgcggatctgggaagtgacggacagaacggtcaggacctggattggggaggcggttgccgccgctgctgctgacggtgtgacgttctctgttccggtcacaccacatacgttccgccattcctatgcgatgcacatgctgtatgccggtataccgctgaaagttctgcaaagcctgatgggacataagtccatcagttcaacggaagtctacacgaaggtttttgcgctggatgtggctgcccggcaccgggtgcagtttgcgatgccggagtctgatgcggttgcgatgctgaaacaattatcctgagaataaatgccttggcctttatatggaaatgtggaactgagtggatatgctgtttttgtctgttaaacagagaagctggctgttatccactgagaagcgaacgaaacagtcgggaaaatctcccattatcgtagagatccgcattattaatctcaggagcctgtgtagcgtttataggaagtagtgttctgtcatgatgcctgcaagcggtaacgaaaacgatttgaatatgccttcaggaacaatagaaatcttcgtgcggtgttacgttgaagtggagcggattatgtcagcaatggacagaacaacctaatgaacacagaaccatgatgtggtctgtccttttacagccagtagtgctcgccgcagtcgagcgacagggcgaagccctcggctggttgccctcgccgctgggctggcggccgtctatggccctgcaaacgcgccagaaacgccgtcgaagccgtgtgcgagacaccgcggccggccgccggcgttgtggatacctcgcggaaaacttggccctcactgacagatgaggggcggacgttgacacttgaggggccgactcacccggcgcggcgttgacagatgaggggcaggctcgatttcggccggcgacgtggagctggccagcctcgcaaatcggcgaaaacgcctgattttacgcgagtttcccacagatgatgtggacaagcctggggataagtgccctgcggtattgacacttgaggggcgcgactactgacagatgaggggcgcgatccttgacacttgaggggcagagtgctgacagatgaggggcgcacctattgacatttgaggggctgtccacaggcagaaaatccagcatttgcaagggtttccgcccgtttttcggccaccgctaacctgtcttttaacctgcttttaaaccaatatttataaaccttgtttttaaccagggctgcgccctgtgcgcgtgaccgcgcacgccgaaggggggtgcccccccttctcgaaccctcccggtcgagtgagcgaggaagcaccagggaacagcacttatatattctgcttacacacgatgcctgaaaaaacttcccttggggttatccacttatccacggggatatttttataattattttttttatagtttttagatcttcttttttagagcgccttgtaggcctttatccatgctggttctagagaaggtgttgtgacaaattgccctttcagtgtgacaaatcaccctcaaatgacagtcctgtctgtgacaaattgcccttaaccctgtgacaaattgccctcagaagaagctgttttttcacaaagttatccctgcttattgactcttttttatttagtgtgacaatctaaaaacttgtcacacttcacatggatctgtcatggcggaaacagcggttatcaatcacaagaaacgtaaaaatagcccgcgaatcgtccagtcaaacgacctcactgaggcggcatatagtctctcccgggatcaaaaacgtatgctgtatctgttcgttgaccagatcagaaaatctgatggcaccctacaggaacatgacggtatctgcgagatccatgttgctaaatatgctgaaatattcggattgacctctgcggaagccagtaaggatatacggcaggcattgaagagtttcgcggggaaggaagtggttttttatcgccctgaagaggatgccggcgatgaaaaaggctatgaatcttttccttggtttatcaaacgtgcgcacagtccatccagagggctttacagtgtacatatcaacccatatctcattcccttctttatcgggttacagaaccggtttacgcagtttcggcttagtgaaacaaaagaaatcaccaatccgtatgccatgcgtttatacgaatccctgtgtcagtatcgtaagccggatggctcaggcatcgtctctctgaaaatcgactggatcatagagcgttaccagctgcctcaaagttaccagcgtatgcctgacttccgccgccgcttcctgcaggtctgtgttaatgagatcaacagcagaactccaatgcgcctctcatacattgagaaaaagaaaggccgccagacgactcatatcgtattttccttccgcgatatcacttccatgacgacaggatagtctgagggttatctgtcacagatttgagggtggttcgtcacatttgttctgacctactgagggtaatttgtcacagttttgctgtttccttcagcctgcatggattttctcatactttttgaactgtaatttttaaggaagccaaatttgagggcagtttgtcacagttgatttccttctctttcccttcgtcatgtgacctgatatcgggggttagttcgtcatcattgatgagggttgattatcacagtttattactctgaattggctatccgcgtgtgtacctctacctggagtttttcccacggtggatatttcttcttgcgctgagcgtaagagctatctgacagaacagttcttctttgcttcctcgccagttcgctcgctatgctcggttacacggctgcggcg

SEQ ID NO: 19 - DNA, 35283 bp, Artificial Sequence
  Clone pCCI-4K-SARS-CoV-2-WDDWW. Based on SARS-CoV-2.
gatgtgctgcaaggcgattaagttgggtaacgccagggttttcccagtcacgacgttgtaaaacgacggccagtgaattgtaatacgactcactatagggcgaattctagttattaatagtaatcaattacggggtcattagttcatagcccatatatggagttccgcgttacataacttacggtaaatggcccgcctggctgaccgcccaacgacccccgcccattgacgtcaataatgacgtatgttcccatagtaacgccaatagggactttccattgacgtcaatgggtggagtatttacggtaaactgcccacttggcagtacatcaagtgtatcatatgccaagtacgccccctattgacgtcaatgacggtaaatggcccgcctggcattatgcccagtacatgaccttatgggactttcctacttggcagtacatctacgtattagtcatcgctattaccatggtgatgcggttttggcagtacatcaatgggcgtggatagcggtttgactcacggggatttccaagtctccaccccattgacgtcaatgggagtttgttttggcaccaaaatcaacgggactttccaaaatgtcgtaacaactccgccccattgacgcaaatgggcggtaggcgtgtacggtgggaggtctatataagcagagctggtttagtgaaccgtattaaaggtttataccttcccaggtaacaaaccaaccaactttcgatctcttgtagatctgttctctaaacgaactttaaaatctgtgtggctgtcactcggctgcatgcttagtgcactcacgcagtataattaataactaattactgtcgttgacaggacacgagtaactcgtctatcttctgcaggctgcttacggtttcgtccgtgttgcagccgatcatcagcacatctaggtttcgtccgggtgtgaccgaaaggtaagatggagagccttgtccctggtttcaacgagaaaacacacgtccaactcagtttgcctgttttacaggttcgcgacgtgctcgtacgtggctttggagactccgtggaggaggtcttatcagaggcacgtcaacatcttaaagatggcacttgtggcttagtagaagttgaaaaaggcgttttgcctcaacttgaacagccctatgtgttcatcaaacgttcggatgctcgaactgcacctcatggtcatgttatggttgagctggtagcagaactcgaaggcattcagtacggtcgtagtggtgagacacttggtgtccttgtccctcatgtgggcgaaataccagtggcttaccgcaaggttcttcttcgtaagaacggtaataaaggagctggtggccatagttacggcgccgatctaaagtcatttgacttaggcgacgagcttggcactgatccttatgaagattttcaagaaaactggaacactaaacatagcagtggtgttacccgtgaactcatgcgtgagcttaacggaggggcatacactcgctatgtcgataacaacttctgtggccctgatggctaccctcttgagtgcattaaagaccttctagcacgtgctggtaaagcttcatgcactttgtccgaacaactggactttattgacactaagaggggtgtatactgctgccgtgaacatgagcatgaaattgcttggtacacggaacgttctgaaaagagctatgaattgcagacaccttttgaaattaaattggcaaagaaatttgacaccttcaatggggaatgtccaaattttgtatttcccttaaattccataatcaagactattcaaccaagggttgaaaagaaaaagcttgatggctttatgggtagaattcgatctgtctatccagttgcgtcaccaaatgaatgcaaccaaatgtgcctttcaactctcatgaagtgtgatcattgtggtgaaacttcatggcagacgggcgattttgttaaagccacttgcgaattttgtggcactgagaatttgactaaagaaggtgccactacttgtggttacttaccccaaaatgctgttgttaaaatttattgtccagcatgtcacaattcagaagtaggacctgagcatagtcttgccgaataccataatgaatctggcttgaaaaccattcttcgtaagggtggtcgcactattgcctttggaggctgtgtgttctcttatgttggttgccataacaagtgtgcctattgggtcccacgtgctagcgctaacataggttgtaaccatacaggtgttgttggagaaggttccgaaggtcttaatgacaaccttcttgaaatactccaaaaagagaaagtcaacatcaatattgttggtgactttaaacttaatgaagagatcgccattattttggcatctttttctgcttccacaagtgcttttgtggaaactgtgaaaggtttggattataaagcattcaaacaaattgttgaatcctgtggtaattttaaagttacaaaaggaaaagctaaaaaaggtgcctggaatattggtgaacagaaatcaatactgagtcctctttatgcatttgcatcagaggctgctcgtgttgtacgatcaattttctcccgcactcttgaaactgctcaaaattctgtgcgtgttttacagaaggccgctataacaatactagatggaatttcacagtattcactgagactcattgatgctatgatgttcacatctgatttggctactaacaatctagttgtaatggcctacattacaggtggtgttgttcagttgacttcgcagtggctaactaacatctttggcactgtttatgaaaaactcaaacccgtccttgattggcttgaagagaagtttaaggaaggtgtagagtttcttagagacggttgggaaattgttaaatttatctcaacctgtgcttgtgaaattgtcggtggacaaattgtcacctgtgcaaaggaaattaaggagagtgttcagacattctttaagcttgtaaataaatttttggctttgtgtgctgactctatcattattggtggagctaaacttaaagccttgaatttaggtgaaacatttgtcacgcactcaaagggattgtacagaaagtgtgttaaatccagagaagaaactggcctactcatgcctctaaaagccccaaaagaaattatcttcttagagggagaaacacttcccacagaagtgttaacagaggaagttgtcttgaaaactggtgatttacaaccattagaacaacctactagtgaagctgttgaagctccattggttggtacaccagtttgtattaacgggcttatgttgctcgaaatcaaagacacagaaaagtactgtgcccttgcacctaatatgatggtaacaaacaataccttcacactcaaaggcggtgcaccaacaaaggttacttttggtgatgacactgtgatagaagtgcaaggttacaagagtgtgaatatcacttttgaacttgatgaaaggattgataaagtacttaatgagaagtgctctgcctatacagttgaactcggtacagaagtaaatgagttcgcctgtgttgtggcagatgctgtcataaaaactttgcaaccagtatctgaattacttacaccactgggcattgatttagatgagtggagtatggctacatactacttatttgatgagtctggtgagtttaaattggcttcacatatgtattgttctttctaccctccagatgaggatgaagaagaaggtgattgtgaagaagaagagtttgagccatcaactcaatatgagtatggtactgaagatgattaccaaggtaaacctttggaatttggtgccacttctgctgctcttcaacctgaagaagagcaagaagaagattggttagatgatgatagtcaacaaactgttggtcaacaagacggcagtgaggacaatcagacaactactattcaaacaattgttgaggttcaacctcaattagagatggaacttacaccagttgttcagactattgaagtgaatagttttagtggttatttaaaacttactgacaatgtatacattaaaaatgcagacattgtggaagaagctaaaaaggtaaaaccaacagtggttgttaatgcagccaatgtttaccttaaacatggaggaggtgttgcaggagccttaaataaggctactaacaatgccatgcaagttgaatctgatgattacatagctactaatggaccacttaaagtgggtggtagttgtgttttaagcggacacaatcttgctaaacactgtcttcatgttgtcggcccaaatgttaacaaaggtgaagacattcaacttcttaagagtgcttatgaaaattttaatcagcacgaagttctacttgcaccattattatcagctggtatttttggtgctgaccctatacattctttaagagtttgtgtagatactgttcgcacaaatgtctacttagctgtctttgataaaaatctctatgacaaacttgtttcaagctttttggaaatgaagagtgaaaagcaagttgaacaaaagatcgctgagattcctaaagaggaagttaagccatttataactgaaagtaaaccttcagttgaacagagaaaacaagatgataagaaaatcaaagcttgtgttgaagaagttacaacaactctggaagaaactaagttcctcacagaaaacttgttactttatattgacattaatggcaatcttcatccagattctgccactcttgttagtgacattgacatcactttcttaaagaaagatgctccatatatagtgggtgatgttgttcaagagggtgttttaactgctgtggttatacctactaaaaaggctggtggcactactgaaatgctagcgaaagctttgagaaaagtgccaacagacaattatataaccacttacccgggtcaaggtttaaatggttatacggtagaagaagcgaaaacggtactaaaaaaatgtaaatcggcgttttatatactaccgtcgataatatcgaatgaaaaacaagaaatactaggtacggtatcgtggaatttacgtgaaatgctagcgcatgcggaagaaacacgtaaattaatgccggtatgtgtagaaacgaaagcgatagtatcgacgatacaacgtaaatataaaggtataaaaatacaagaaggtgtagtagattatggtgcgcgtttttatttttatacgtcgaaaacgacggtagcgtcgctaataaatacgctaaatgatctaaatgaaacgctagtaacgatgccgctaggttatgtaacgcatggtttaaatttagaagaagcggcgcgttatatgcgttcgctaaaagtaccggcgacggtatcggtatcgtcgccggatgcggtaacggcgtataatggttatctaacgtcgtcgtcgaaaacgccggaagaacattttatagaaacgatatcgctagcgggttcgtataaagattggtcgtattcgggtcaatcgacgcaactaggtatagaatttctaaaacgtggtgataaatcggtatattatacgtcgaatccgacgacgtttcatctagatggtgaagtaataacgtttgataatctaaaaacgctactatcgttacgtgaagtacgtacgataaaagtatttacgacggtagataatataaatctacatacgcaagtagtagatatgtcgatgacatatggacaacaatttggtccgacgtatttagatggtgcggatgttacgaaaataaaaccgcataattcgcatgaaggtaaaacgttttatgtattaccgaatgatgatacgctacgtgtagaagcgtttgaatattatcatacgactgatccgtcgtttctaggtcgttatatgtcggcgttaaatcatacgaaaaaatggaaatatccgcaagtaaatggtttaacgtcgataaaatgggcggataataattgttatctagcgacggcgttattaacgctacaacaaatagaattaaaatttaatccgccggcgctacaagatgcgtattatcgtgcgcgtgcgggtgaagcggcgaatttttgtgcgctaatattagcgtattgtaataaaacggtaggtgaattaggtgatgtacgtgaaacgatgtcgtatttatttcaacatgcgaatttagattcgtgtaaacgtgtattaaatgtagtatgtaaaacgtgtggtcaacaacaaacgacgctaaaaggtgtagaagcggtaatgtatatgggtacgctatcgtatgaacaatttaaaaaaggtgtacaaataccgtgtacgtgtggtaaacaagcgacgaaatatctagtacaacaagaatcgccgtttgtaatgatgtcggcgccgccggcgcaatatgaactaaaacatggtacgtttacgtgtgcgtcggaatatacgggtaattatcaatgtggtcattataaacatataacgtcgaaagaaacgttatattgtatagatggtgcgttacttacgaaatcgtcggaatataaaggtccgataacggatgtattttataaagaaaattcgtatacgacgacgataaaaccggtaacgtataaattagatggtgtagtatgtacggaaatagatccgaaattagataattattataaaaaagataattcgtattttacggaacaaccgatagatctagtaccgaatcaaccatatccgaatgcgtcgtttgataattttaaatttgtatgtgataatataaaatttgcggatgatttaaatcaattaacgggttataaaaaaccggcgtcgcgtgaactaaaagtaacgttttttccggatttaaatggtgatgtagtagcgatagattataaacattatacgccgtcgtttaaaaaaggtgcgaaattattacataaaccgatagtatggcatgtaaataatgcgacgaataaagcgacgtataaaccgaatacgtggtgtatacggtgtctatggagcacgaaaccggtagaaacgtcgaattcgtttgatgtactaaaatcggaagatgcgcaaggtatggataatctagcgtgtgaagatctaaaaccggtatcggaagaagtagtagaaaatccgacgatacaaaaagatgtactggaatgtaatgtaaaaacgacggaagtagtaggtgatataatactaaaaccggctaataattcgttaaaaataacggaagaagtaggtcatacggatctaatggcggcgtatgtagataattcgtcgctaacgataaaaaaaccgaatgaattatcgcgtgtattaggtttaaaaacgctagcgacgcatggtttagctgctgtaaattcggtaccgtgggatacgatagcgaattatgcgaaaccgtttctaaataaagtagtatcgacgacgacgaatatagtaacgcgatgtttaaatcgtgtatgtacgaattatatgccgtatttttttacgttattactacaattatgtacgtttacgcgatcgacgaattcgcgtataaaagcgtcgatgccgacgacgatagcgaaaaatacggtaaaatcggtaggtaaattttgtctagaagcgtcgtttaattatttaaaatcgccgaatttttctaaactaataaatataataatatggtttttactattatcggtatgcctaggttcgttaatatattcgacggcggcgttaggtgtattaatgtcgaatttaggtatgccgtcgtattgtacgggttatcgtgaaggttatttaaattcgacgaatgtaacgatagcgacgtattgtacgggttcgataccgtgttcggtatgtctatcgggtttagattcgttagatacgtatccgtcgttagaaacgatacaaataacgatatcgtcgtttaaatgggatttaacggcgtttggtttagtagcggaatggtttttagcgtatatactatttacgcgatttttttatgtactaggtttagcggcgataatgcaattatttttttcgtattttgcggtacattttatttcgaattcgtggctaatgtggttaataataaatctagtacaaatggcgccgatatcggcgatggtacgtatgtatatattttttgcgtcgttttattatgtatggaaatcgtatgtacatgtagtagatggttgtaattcgtcgacgtgtatgatgtgttataaacgtaatcgtgcgacgcgagtagaatgtacgacgatagtaaatggtgtacgtcgttcgttttatgtatatgcgaatggtggtaaaggtttttgtaaactacataattggaattgtgtaaattgtgatacgttttgtgcgggttcgacgtttatatcggatgaagtagcgcgtgatttatcgctacaatttaaacgtccgataaatccgacggatcaatcgtcgtatatagtagattcggtaacggtaaaaaatggttcgatacatctatattttgataaagcgggtcaaaaaacgtatgaacgtcattcgctatcgcattttgtaaatttagataatctacgtgcgaataatacgaaaggttcgttaccgataaatgtaatagtatttgatggtaaatcgaaatgtgaagaatcgtcggcgaaatcggcgtcggtatattattcgcaactaatgtgtcaaccgatactattactagatcaagcgttagtatcggatgtaggtgattcggcggaagtagcggtaaaaatgtttgatgcgtatgtaaatacgttttcgtcgacgtttaatgtaccgatggaaaaactaaaaacgctagtagcgacggcggaagcggaactagcgaaaaatgtatctttagataatgtattatcgacgtttatatcggcggcgcgtcaaggttttgtagattcggatgtagaaacgaaagatgtagtagaatgtctaaaattatcgcatcaatcggatatagaagtaacgggtgattcgtgtaataattatatgctaacgtataataaagtagaaaatatgacgccgcgtgatctaggtgcgtgtatagattgttcggcgcgtcatataaatgcgcaagtagcgaaatcgcataatatagcgttaatatggaatgtaaaagattttatgtcgttatcggaacaactacgtaaacaaatacgttcggcggcgaaaaaaaataatttaccgtttaaattaacgtgtgcgacgacgcgacaagtagtaaatgtagtaacgacgaaaatagcgctaaaaggtggtaaaatagtaaataattggttaaaacaattaattaaagttacacttgtgttcctttttgttgctgctattttctatttaataacacctgttcatgtcatgtctaaacatactgacttttcaagtgaaatcataggatacaaggctattgatggtggtgtcactcgtgacatagcatctacagatacttgttttgctaacaaacatgctgattttgacacatggtttagccagcgtggtggtagttatactaatgacaaagcttgcccattgattgctgcagtcataacaagagaagtgggttttgtcgtgcctggtttgcctggcacgatattacgcacaactaatggtgactttttgcatttcttacctagagtttttagtgcagttggtaacatctgttacacaccatcaaaacttatagagtacactgactttgcaacatcagcttgtgttttggctgctgaatgtacaatttttaaagatgcttctggtaagccagtaccatattgttatgataccaatgtactagaaggttctgttgcttatgaaagtttacgccctgacacacgttatgtgctcatggatggctctattattcaatttcctaacacctaccttgaaggttctgttagagtggtaacaacttttgattctgagtactgtaggcacggcacttgtgaaagatcagaagctggtgtttgtgtatctactagtggtagatgggtacttaacaatgattattacagatctttaccaggagttttctgtggtgtagatgctgtaaatttacttactaatatgtttacaccactaattcaacctattggtgctttggacatatcagcatctatagtagctggtggtattgtagctatcgtagtaacatgccttgcctactattttatgaggtttagaagagcttttggtgaatacagtcatgtagttgcctttaatactttactattccttatgtcattcactgtactctgtttaacaccagtttactcattcttacctggtgtttattctgttatttacttgtacttgacattttatcttactaatgatgtttcttttttagcacatattcagtggatggttatgttcacacctttagtacctttctggataacaattgcttatatcatttgtatttccacaaagcatttctattggttctttagtaattacctaaagagacgtgtagtctttaatggtgtttcctttagtacttttgaagaagctgcgctgtgcacctttttgttaaataaagaaatgtatctaaagttgcgtagtgatgtgctattacctcttacgcaatataatagatacttagctctttataataagtacaagtattttagtggagcaatggatacaactagctacagagaagctgcttgttgtcatctcgcaaaggctctcaatgacttcagtaactcaggttctgatgttctttaccaaccaccacaaacctctatcacctcagctgttttgcagagtggttttagaaaaatggcattcccatctggtaaagttgagggttgtatggtacaagtaacttgtggtacaactacacttaacggtctttggcttgatgacgtagtttactgtccaagacatgtgatctgcacctctgaagacatgcttaaccctaattatgaagatttactcattcgtaagtctaatcataatttcttggtacaggctggtaatgttcaactcagggttattggacattctatgcaaaattgtgtacttaagcttaaggttgatacagccaatcctaagacacctaagtataagtttgttcgcattcaaccaggacagactttttcagtgttagcttgttacaatggttcaccatctggtgtttaccaatgtgctatgaggcccaatttcactattaagggttcattccttaatggttcatgtggtagtgttggttttaacatagattatgactgtgtctctttttgttacatgcaccatatggaattaccaactggagttcatgctggcacagacttagaaggtaacttttatggaccttttgttgacaggcaaacagcacaagcagctggtacggacacaactattacagttaatgttttagcttggttgtacgctgctgttataaatggagacaggtggtttctcaatcgatttaccacaactcttaatgactttaaccttgtggctatgaagtacaattatgaacctctaacacaagaccatgttgacatactaggacctctttctgctcaaactggaattgccgttttagatatgtgtgcttcattaaaagaattactgcaaaatggtatgaatggacgtaccatattgggtagtgctttattagaagatgaatttacaccttttgatgttgttagacaatgctcaggtgttactttccaaagtgcagtgaaaagaacaatcaagggtacacaccactggttgttactcacaattttgacttcacttttagttttagtccagagtactcaatggtctttgttcttttttttgtatgaaaatgcctttttaccttttgctatgggtattattgctatgtctgcttttgcaatgatgtttgtcaaacataagcatgcatttctctgtttgtttttgttaccttctcttgccactgtagcttattttaatatggtctatatgcctgctagttgggtgatgcgtattatgacatggttggatatggttgatactagtttgtctggttttaagctaaaagactgtgttatgtatgcatcagctgtagtgttactaatccttatgacagcaagaactgtgtatgatgatggtgctaggagagtgtggacacttatgaatgtcttgacactcgtttataaagtttattatggtaatgctttagatcaagccatttccatgtgggctcttataatctctgttacttctaactactcaggtgtagttacaactgtcatgtttttggccagaggtattgtttttatgtgtgttgagtattgccctattttcttcataactggtaatacacttcagtgtataatgctagtttattgtttcttaggctatttttgtacttgttactttggcctcttttgtttactcaaccgctactttagactgactcttggtgtttatgattacttagtttctacacaggagtttagatatatgaattcacagggactactcccacccaagaatagcatagatgccttcaaactcaacattaaattgttgggtgttggtggcaaaccttgtatcaaagtagccactgtacagtctaaaatgtcagatgtaaagtgcacatcagtagtcttactctcagttttgcaacaactcagagtagaatcatcatctaaattgtgggctcaatgtgtccagttacacaatgacattctcttagctaaagatactactgaagcctttgaaaaaatggtttcactactttctgttttgctttccatgcagggtgctgtagacataaacaagctttgtgaagaaatgctggacaacagggcaaccttacaagctatagcctcagagtttagttcccttccatcatatgcagcttttgctactgctcaagaagcttatgagcaggctgttgctaatggtgattctgaagttgttcttaaaaagttgaagaagtctttgaatgtggctaaatctgaatttgaccgtgatgcagccatgcaacgtaagttggaaaagatggctgatcaagctatgacccaaatgtataaacaggctagatctgaggacaagagggcaaaagttactagtgctatgcagacaatgcttttcactatgcttagaaagttggataatgatgcactcaacaacattatcaacaatgcaagagatggttgtgttcccttgaacataatacctcttacaacagcagccaaactaatggttgtcataccagactataacacatataaaaatacgtgtgatggtacaacatttacttatgcatcagcattgtgggaaatccaacaggttgtagatgcagatagtaaaattgttcaacttagtgaaattagtatggacaattcacctaatttagcatggcctcttattgtaacagctttaagggccaattctgctgtcaaattacagaataatgagcttagtcctgttgcactacgacagatgtcttgtgctgccggtactacacaaactgcttgcactgatgacaatgcgttagcttactacaacacaacaaagggaggtaggtttgtacttgcactgttatccgatttacaggatttgaaatgggctagattccctaagagtgatggaactggtactatctatacagaactggaaccaccttgtaggtttgttacagacacacctaaaggtcctaaagtgaagtatttatactttattaaaggattaaacaacctaaatagaggtatggtacttggtagtttagctgccacagtacgtctacaagctggtaatgcaacagaagtgcctgccaattcaactgtattatctttctgtgcttttgctgtagatgctgctaaagcttacaaagattatctagctagtgggggacaaccaatcactaattgtgttaagatgttgtgtacacacactggtactggtcaggcaataacagttacaccggaagccaatatggatcaagaatcctttggtggtgcatcgtgttgtctgtactgccgttgccacatagatcatccaaatcctaaaggattttgtgacttaaaaggtaagtatgtacaaatacctacaacttgtgctaatgaccctgtgggttttacacttaaaaacacagtctgtaccgtctgcggtatgtggaaaggttatggctgtagttgtgatcaactccgcgaacccatgcttcagtcagctgatgcacaatcgtttttaaacgggtttgcggtgtaagtgcagcccgtcttacaccgtgcggcacaggcactagtactgatgtcgtatacagggcttttgacatctacaatgataaagtagctggttttgctaaattcctaaaaactaattgttgtcgcttccaagaaaaggacgaagatgacaatttaattgattcttactttgtagttaagagacacactttctctaactaccaacatgaagaaacaatttataatttacttaaggattgtccagctgttgctaaacatgacttctttaagtttagaatagacggtgacatggtaccacatatatcacgtcaacgtcttactaaatacacaatggcagacctcgtctatgctttaaggcattttgatgaaggtaattgtgacacattaaaagaaatacttgtcacatacaattgttgtgatgatgattatttcaataaaaaggactggtatgattttgtagaaaacccagatatattacgcgtatacgccaacttaggtgaacgtgtacgccaagctttgttaaaaacagtacaattctgtgatgccatgcgaaatgctggtattgttggtgtactgacattagataatcaagatctcaatggtaactggtatgatttcggtgatttcatacaaaccacgccaggtagtggagttcctgttgtagattcttattattcattgttaatgcctatattaaccttgaccagggctttaactgcagagtcacatgttgacactgacttaacaaagccttacattaagtgggatttgttaaaatatgacttcacggaagagaggttaaaactctttgaccgttattttaaatattgggatcagacataccacccaaattgtgttaactgtttggatgacagatgcattctgcattgtgcaaactttaatgttttattctctacagtgttcccacctacaagttttggaccactagtgagaaaaatatttgttgatggtgttccatttgtagtttcaactggataccacttcagagagctaggtgttgtacataatcaggatgtaaacttacatagctctagacttagttttaaggaattacttgtgtatgctgctgaccctgctatgcacgctgcttctggtaatctattactagataaacgcactacgtgcttttcagtagctgcacttactaacaatgttgcttttcaaactgtcaaacccggtaattttaacaaagacttctatgactttgctgtgtctaagggtttctttaaggaaggaagttctgttgaattaaaacacttcttctttgctcaggatggtaatgctgctatcagcgattatgactactatcgttataatctaccaacaatgtgtgatatcagacaactactatttgtagttgaagttgttgataagtactttgattgttacgatggtggctgtattaatgctaaccaagtcatcgtcaacaacctagacaaatcagctggttttccatttaataaatggggtaaggctagactttattatgattcaatgagttatgaggatcaagatgcacttttcgcatatacaaaacgtaatgtcatccctactataactcaaatgaatcttaagtatgccattagtgcaaagaatagagctcgcaccgtagctggtgtctctatctgtagtactatgaccaatagacagtttcatcaaaaattattgaaatcaatagccgccactagaggagctactgtagtaattggaacaagcaaattctatggtggttggcacaacatgttaaaaactgtttatagtgatgtagaaaaccctcaccttatgggttgggattatcctaaatgtgatagagccatgcctaacatgcttagaattatggcctcacttgttcttgctcgcaaacatacaacgtgttgtagcttgtcacaccgtttctatagattagctaatgagtgtgctcaagtattgagtgaaatggtcatgtgtggcggttcactatatgttaaaccaggtggaacctcatcaggagatgccacaactgcttatgctaatagtgtttttaacatttgtcaagctgtcacggccaatgttaatgcacttttatctactgatggtaacaaaattgccgataagtatgtccgcaatttacaacacagactttatgagtgtctctatagaaatagagatgttgacacagactttgtgaatgagttttacgcatatttgcgtaaacatttctcaatgatgatactctctgacgatgctgttgtgtgtttcaatagcacttatgcatctcaaggtctagtggctagcataaagaactttaagtcagttctttattatcaaaacaatgtttttatgtctgaagcaaaatgttggactgagactgaccttactaaaggacctcatgaattttgctctcaacatacaatgctagttaaacagggtgatgattatgtgtaccttccttacccagatccatcaagaatcctaggggccggctgttttgtagatgatatcgtaaaaacagatggtacacttatgattgaacggttcgtgtctttagctatagatgcttacccacttactaaacatcctaatcaggagtatgctgatgtctttcatttgtacttacaatacataagaaagctacatgatgagttaacaggacacatgttagacatgtattctgttatgcttactaatgataacacttcaaggtattgggaacctgagttttatgaggctatgtacacaccgcatacagtcttacaggctgttggggcttgtgttctttgcaattcacagacttcattaagatgtggtgcttgcatacgtagaccattcttatgttgtaaatgctgttacgaccatgtcatatcaacatcacataaattagtcttgtctgttaatccgtatgtttgcaatgctccaggttgtgatgtcacagatgtgactcaactttacttaggaggtatgagctattattgtaaatcacataaaccacccattagttttccattgtgtgctaatggacaagtttttggtttatataaaaatacatgtgttggtagcgataatgttactgactttaatgcaattgcaacatgtgactggacaaatgctggtgattacattttagctaacacctgtactgaaagactcaagctttttgcagcagaaacgctcaaagctactgaggagacatttaaactgtcttatggtattgctactgtacgtgaagtgctgtctgacagagaattacatctttcatgggaagttggtaaacctagaccaccacttaaccgaaattatgtctttactggttatcgtgtaactaaaaacagtaaagtacaaataggagagtacacctttgaaaaaggtgactatggtgatgctgttgtttaccgaggtacaacaacttacaaattaaatgttggtgattattttgtgctgacatcacatacagtaatgccattaagtgcacctacactagtgccacaagagcactatgttagaattactggcttatacccaacactcaatatctcagatgagttttctagcaatgttgcaaattatcaaaaggttggtatgcaaaagtattctacactccagggaccacctggtactggtaagagtcattttgctattggcctagctctctactacccttctgctcgcatagtgtatacagcttgctctcatgccgctgttgatgcactatgtgagaaggcattaaaatatttgcctatagataaatgtagtagaattatacctgcacgtgctcgtgtagagtgttttgataaattcaaagtgaattcaacattagaacagtatgtcttttgtactgtaaatgcattgcctgagacgacagcagatatagttgtctttgatgaaatttcaatggccacaaattatgatttgagtgttgtcaatgccagattacgtgctaagcactatgtgtacattggcgaccctgctcaattacctgcaccacgcacattgctaactaagggcacactagaaccagaatatttcaattcagtgtgtagacttatgaaaactataggtccagacatgttcctcggaacttgtcggcgttgtcctgctgaaattgttgacactgtgagtgctttggtttatgataataagcttaaagcacataaagacaaatcagctcaatgctttaaaatgttttataagggtgttatcacgcatgatgtttcatctgcaattaacaggccacaaataggcgtggtaagagaattccttacacgtaaccctgcttggagaaaagctgtctttatttcaccttataattcacagaatgctgtagcctcaaagattttgggactaccaactcaaactgttgattcatcacagggctcagaatatgactatgtcatattcactcaaaccactgaaacagctcactcttgtaatgtaaacagatttaatgttgctattaccagagcaaaagtaggcatactttgcataatgtctgatagagacctttatgacaagttgcaatttacaagtcttgaaattccacgtaggaatgtggcaactttacaagctgaaaatgtaacaggactctttaaagattgtagtaaggtaatcactgggttacatcctacacaggcacctacacacctcagtgttgacactaaattcaaaactgaaggtttatgtgttgacatacctggcatacctaaggacatgacctatagaagactcatctctatgatgggttttaaaatgaattatcaagttaatggttaccctaacatgtttatcacccgcgaagaagctataagacatgtacgtgcatggattggcttcgatgtcgaggggtgtcatgctactagagaagctgttggtaccaatttacctttacagctaggtttttctacaggtgttaacctagttgctgtacctacaggttatgttgatacacctaataatacagatttttccagagttagtgctaaaccaccgcctggagatcaatttaaacacctcataccacttatgtacaaaggacttccttggaatgtagtgcgtataaagattgtacaaatgttaagtgacacacttaaaaatctctctgacagagtcgtatttgtcttatgggcacatggctttgagttgacatctatgaagtattttgtgaaaataggacctgagcgcacctgttgtctatgtgatagacgtgccacatgcttttccactgcttcagacacttatgcctgttggcatcattctattggatttgattacgtctataatccgtttatgattgatgttcaacaatggggttttacaggtaacctacaaagcaaccatgatctgtattgtcaagtccatggtaatgcacatgtagctagttgtgatgcaatcatgactaggtgtctagctgtccacgagtgctttgttaagcgtgttgactggactattgaatatcctataattggtgatgaactgaagattaatgcggcttgtagaaaggttcaacacatggttgttaaagctgcattattagcagacaaattcccagttcttcacgacattggtaaccctaaagctattaagtgtgtacctcaagctgatgtagaatggaagttctatgatgcacagccttgtagtgacaaagcttataaaatagaagaattattctattcttatgccacacattctgacaaattcacagatggtgtatgcctattttggaattgcaatgtcgatagatatcctgctaattccattgtttgtagatttgacactagagtgctatctaaccttaacttgcctggttgtgatggtggcagtttgtatgtaaataaacatgcattccacacaccagcttttgataaaagtgcttttgttaatttaaaacaattaccatttttctattactctgacagtccatgtgagtctcatggaaaacaagtagtgtcagatatagattatgtaccactaaagtctgctacgtgtataacacgttgcaatttaggtggtgctgtctgtagacatcatgctaatgagtacagattgtatctcgatgcttataacatgatgatctcagctggctttagcttgtgggtttacaaacaatttgatacttataacctctggaacacttttacaagacttcagagtttagaaaatgtggcttttaatgttgtaaataagggacactttgatggacaacagggtgaagtaccagtttctatcattaataacactgtttacacaaaagttgatggtgttgatgtagaattgtttgaaaataaaacaacattacctgttaatgtagcatttgagctttgggctaagcgcaacattaaaccagtaccagaggtgaaaatactcaataatttgggtgtggacattgctgctaatactgtgatctgggactacaaaagagatgctccagcacatatatctactattggtgtttgttctatgactgacatagccaagaaaccaactgaaacgatttgtgcaccactcactgtcttttttgatggtagagttgatggtcaagtagacttatttagaaatgcccgtaatggtgttcttattacagaaggtagtgttaaaggtttacaaccatctgtaggtcccaaacaagctagtcttaatggagtcacattaattggagaagccgtaaaaacacagttcaattattataagaaagttgatggtgttgtccaacaattacctgaaacttactttactcagagtagaaatttacaagaatttaaacccaggagtcaaatggaaattgatttcttagaattagctatggatgaattcattgaacggtataaattagaaggctatgccttcgaacatatcgtttatggagattttagtcatagtcagttaggtggtttacatctactgattggactagctaaacgttttaaggaatcaccttttgaattagaagattttattcctatggacagtacagttaaaaactatttcataacagatgcgcaaacaggttcatctaagtgtgtgtgttctgttattgatttattacttgatgattttgttgaaataataaaatcccaagatttatctgtagtttctaaggttgtcaaagtgactattgactatacagaaatttcatttatgctttggtgtaaagatggccatgtagaaacattttacccaaaattacaatctagtcaagcgtggcaaccgggtgttgctatgcctaatctttacaaaatgcaaagaatgctattagaaaagtgtgaccttcaaaattatggtgatagtgcaacattacctaaaggcataatgatgaatgtcgcaaaatatactcaactgtgtcaatatttaaacacattaacattagctgtaccctataatatgagagttatacattttggtgctggttctgataaaggagttgcaccaggtacagctgttttaagacagtggttgcctacgggtacgctgcttgtcgattcagatcttaatgactttgtctctgatgcagattcaactttgattggtgattgtgcaactgtacatacagctaataaatgggatctcattattagtgatatgtacgaccctaagactaaaaatgttacaaaagaaaatgactctaaagagggttttttcacttacatttgtgggtttatacaacaaaagctagctcttggaggttccgtggctataaagataacagaacattcttggaatgctgatctttataagctcatgggacacttcgcatggtggacagcctttgttactaatgtgaatgcgtcatcatctgaagcatttttaattggatgtaattatcttggcaaaccacgcgaacaaatagatggttatgtcatgcatgcaaattacatattttggaggaatacaaatccaattcagttgtcttcctattctttatttgacatgagtaaatttccccttaaattaaggggtactgctgttatgtctttaaaagaaggtcaaatcaatgatatgattttatctcttcttagtaaaggtagacttataattagagaaaacaacagagttgttatttctagtgatgttcttgttaacaactaaacgaacaatgtttgtttttcttgttttattgccactagtctctagtcagtgtgttaatcttacaaccagaactcaattaccccctgcatacactaattctttcacacgtggtgtttattaccctgacaaagttttcagatcctcagttttacattcaactcaggacttgttcttacctttcttttccaatgttacttggttccatgctatacatgtctctgggaccaatggtactaagaggtttgataaccctgtcctaccatttaatgatggtgtttattttgcttccactgagaagtctaacataataagaggctggatttttggtactactttagattcgaagacccagtccctacttattgttaataacgctactaatgttgttattaaagtctgtgaatttcaattttgtaatgatccatttttgggtgtttattaccacaaaaacaacaaaagttggatggaaagtgagttcagagtttattctagtgcgaataattgcacttttgaatatgtctctcagccttttcttatggaccttgaaggaaaacagggtaatttcaaaaatcttagggaatttgtgtttaagaatattgatggttattttaaaatatattctaagcacacgcctattaatttagtgcgtgatctcccccagggtttttcggctttagaaccattggtagatttgccaataggtattaacatcactaggtttcaaactttacttgctttacatagaagttatttgactcctggtgattcttcttcaggttggacagctggtgctgcagcttattatgtgggttatcttcaacctaggacttttctattaaaatataatgaaaatggaaccattacagatgctgtagactgtgcacttgaccctctctcagaaacaaagtgtacgttgaaatccttcactgtagaaaaaggaatctatcaaacttctaactttagagtccaaccaacagaatctattgttagatttcctaatattacaaacttgtgcccttttggtgaagtttttaacgccaccagatttgcatctgtttatgcttggaacaggaagagaatcagcaactgtgttgctgattattctgtcctatataattccgcatcattttccacttttaagtgttatggagtgtctcctactaaattaaatgatctctgctttactaatgtctatgcagattcatttgtaattagaggtgatgaagtcagacaaatcgctccagggcaaactggaaagattgctgattataattataaattaccagatgattttacaggctgcgttatagcttggaattctaacaatcttgattctaaggttggtggtaattataattacctgtatagattgtttaggaagtctaatctcaaaccttttgagagagatatttcaactgaaatctatcaggccggtagcacaccttgtaatggtgttgaaggttttaattgttactttcctttacaatcatatggtttccaacccactaatggtgttggttaccaaccatacagagtagtagtactttcttttgaacttctacatgcaccagcaactgtttgtggacctaaaaagtctactaatttggttaaaaacaaatgtgtcaatttcaacttcaatggtttaacaggcacaggtgttcttactgagtctaacaaaaagtttctgcctttccaacaatttggcagagacattgctgacactactgatgctgtccgtgatccacagacacttgagattcttgacattacaccatgttcttttggtggtgtcagtgttataacaccaggaacaaatacttctaaccaggttgctgttctttatcaggatgttaactgcacagaagtccctgttgctattcatgcagatcaacttactcctacttggcgtgtttattctacaggttctaatgtttttcaaacacgtgcaggctgtttaataggggctgaacatgtcaacaactcatatgagtgtgacatacccattggtgcaggtatatgcgctagttatcagactcagactaattctcctcggcgggcacgtagtgtagctagtcaatccatcattgcctacactatgtcacttggtgcagaaaattcagttgcttactctaataactctattgccatacccacaaattttactattagtgttaccacagaaattctaccagtgtctatgaccaagacatcagtagattgtacaatgtacatttgtggtgattcaactgaatgcagcaatcttttgttgcaatatggcagtttttgtacacaattaaaccgtgctttaactggaatagctgttgaacaagacaaaaacacccaagaagtttttgcacaagtcaaacaaatttacaaaacaccaccaattaaagattttggtggttttaatttttcacaaatattaccagatccatcaaaaccaagcaagaggtcatttattgaagatctacttttcaacaaagtgacacttgcagatgctggcttcatcaaacaatatggtgattgccttggtgatattgctgctagagacctcatttgtgcacaaaagtttaacggccttactgttttgccacctttgctcacagatgaaatgattgctcaatacacttctgcactgttagcgggtacaatcacttctggttggacctttggtgcaggtgctgcattacaaataccatttgctatgcaaatggcttataggtttaatggtattggagttacacagaatgttctctatgagaaccaaaaattgattgccaaccaatttaatagtgctattggcaaaattcaagactcactttcttccacagcaagtgcacttggaaaacttcaagatgtggtcaaccaaaatgcacaagctttaaacacgcttgttaaacaacttagctccaattttggtgcaatttcaagtgttttaaatgatatcctttcacgtcttgacaaagttgaggctgaagtgcaaattgataggttgatcacaggcagacttcaaagtttgcagacatatgtgactcaacaattaattagagctgcagaaatcagagcttctgctaatcttgctgctactaaaatgtcagagtgtgtacttggacaatcaaaaagagttgatttttgtggaaagggctatcatcttatgtccttccctcagtcagcacctcatggtgtagtcttcttgcatgtgacttatgtccctgcacaagaaaagaacttcacaactgctcctgccatttgtcatgatggaaaagcacactttcctcgtgaaggtgtctttgtttcaaatggcacacactggtttgtaacacaaaggaatttttatgaaccacaaatcattactacagacaacacatttgtgtctggtaactgtgatgttgtaataggaattgtcaacaacacagtttatgatcctttgcaacctgaattagactcattcaaggaggagttagataaatattttaagaatcatacatcaccagatgttgatttaggtgacatctctggcattaatgcttcagttgtaaacattcaaaaagaaattgaccgcctcaatgaggttgccaagaatttaaatgaatctctcatcgatctccaagaacttggaaagtatgagcagtatataaaatggccatggtacatttggctaggttttatagctggcttgattgccatagtaatggtgacaattatgctttgctgtatgaccagttgctgtagttgtctcaagggctgttgttcttgtggatcctgctgcaaatttgatgaagacgactctgagccagtgctcaaaggagtcaaattacattacacataaacgaacttatggatttgtttatgagaatcttcacaattggaactgtaactttgaagcaaggtgaaatcaaggatgctactccttcagattttgttcgcgctactgcaacgataccgatacaagcctcactccctttcggatggcttattgttggcgttgcacttcttgctgtttttcagagcgcttccaaaatcataaccctcaaaaagagatggcaactagcactctccaagggtgttcactttgtttgcaacttgctgttgttgtttgtaacagtttactcacaccttttgctcgttgctgctggccttgaagccccttttctctatctttatgctttagtctacttcttgcagagtataaactttgtaagaataataatgaggctttggctttgctggaaatgccgttccaaaaacccattactttatgatgccaactattttctttgctggcatactaattgttacgactattgtataccttacaatagtgtaacttcttcaattgtcattacttcaggtgatggcacaacaagtcctatttctgaacatgactaccagattggtggttatactgaaaaatgggaatctggagtaaaagactgtgttgtattacacagttacttcacttcagactattaccagctgtactcaactcaattgagtacagacactggtgttgaacatgttaccttcttcatctacaataaaattgttgatgagcctgaagaacatgtccaaattcacacaatcgacggttcatccggagttgttaatccagtaatggaaccaatttatgatgaaccgacgacgactactagcgtgcctttgtaagcacaagctgatgagtacgaacttatgtactcattcgtttcggaagagacaggtacgttaatagttaatagcgtacttctttttcttgctttcgtggtattcttgctagttacactagccatccttactgcgcttcgattgtgtgcgtactgctgcaatattgttaacgtgagtcttgtaaaaccttctttttacgtttactctcgtgttaaaaatctgaattcttctagagttcctgatcttctggtctaaacgaactaaatattatattagtttttctgtttggaactttaattttagccatggcagattccaacggtactattaccgttgaagagcttaaaaagctccttgaacaatggaacctagtaataggtttcctattccttacatggatttgtcttctacaatttgcctatgccaacaggaataggtttttgtatataattaagttaattttcctctggctgttatggccagtaactttagcttgttttgtgcttgctgctgtttacagaataaattggatcaccggtggaattgctatcgcaatggcttgtcttgtaggcttgatgtggctcagctacttcattgcttctttcagactgtttgcgcgtacgcgatccatgtggtcattcaatccagaaactaacattcttctcaacgtgccactccatggcactattctgaccagaccgcttctagaaagtgaactcgtaatcggagctgtgatccttcgtggacatcttcgtattgctggacaccatctaggacgctgtgacatcaaggacctgcctaaagaaatcactgttgctacatcacgaacgctttcttattacaaattgggagcttcgcagcgtgtagcaggtgactcaggttttgctgcatacagtcgctacaggattggcaactataaattaaacacagaccattccagtagcagtgacaatattgctttgcttgtacagtaagtgacaacagatgtttcatctcgttgactttcaggttactatagcagagatattactaattattatgaggacttttaaagtttccatttggaatcttgattacatcataaacctcataattaaaaatttatctaagtcactaactgagaataaatattctcaattagatgaagagcaaccaatggagattgattaaacgaacatgaaaattattcttttcttggcactgataacactcgctacttgtgagctttatcactaccaagagtgtgttagaggtacaacagtacttttaaaagaaccttgctcttctggaacatacgagggcaattcaccatttcatcctctagctgataacaaatttgcactgacttgctttagcactcaatttgcttttgcttgtcctgacggcgtaaaacacgtctatcagttacgtgccagatcagtttcacctaaactgttcatcagacaagaggaagttcaagaactttactctccaatttttcttattgttgcggcaatagtgtttataacactttgcttcacactcaaaagaaagacagaatgattgaactttcattaattgacttctatttgtgctttttagcctttctgctattccttgttttaattatgcttattatcttttggttctcacttgaactgcaagatcataatgaaacttgtcacgcctaaacgaacatgaaatttcttgttttcttaggaatcatcacaactgtagctgcatttcaccaagaatgtagtttacagtcatgtactcaacatcaaccatatgtagttgatgacccgtgtcctattcacttctattctaaatggtatattagagtaggagctagaaaatcagcacctttaattgaattgtgcgtggatgaggctggttctaaatcacccattcagtacatcgatatcggtaattatacagtttcctgtttaccttttacaattaattgccaggaacctaaattgggtagtcttgtagtgcgttgttcgttctatgaagactttttagagtatcatgacgttcgtgttgttttagatttcatctaaacgaacaaactaaaatgtctgataatggaccccaaaatcagcgaaatgcaccccgcattacgtttggtggaccctcagattcaactggcagtaaccagaatggagaacgcagtggggcgcgatcaaaacaacgtcggccccaaggtttacccaataatactgcgtcttggttcaccgctctcactcaacatggcaaggaagaccttaaattccctcgaggacaaggcgttccaattaacaccaatagcagtccagatgaccaaattggctactaccgaagagctaccagacgaattcgtggtggtgacggtaaaatgaaagatctcagtccaagatggtatttctactacctaggaactgggccagaagctggacttccctatggtgctaacaaagacggcatcatatgggttgcaactgagggagccttgaatacaccaaaagatcacattggcacccgcaatcctgctaacaatgctgcaatcgtgctacaacttcctcaaggaacaacattgccaaaaggcttctacgcagaagggagcagaggcggcagtcaagcctcttctcgttcctcatcacgtagtcgcaacagttcaagaaattcaactccaggcagcagtaggggaacttctcctgctagaatggctggcaatggcggtgatgctgctcttgctttgctgctgcttgacagattgaaccagcttgagagcaaaatgtctggtaaaggccaacaacaacaaggccaaactgtcactaagaaatctgctgctgaggcttctaagaagcctcggcaaaaacgtactgccactaaagcatacaatgtaacacaagctttcggcagacgtggtccagaacaaacccaaggaaattttggggaccaggaactaatcagacaaggaactgattacaaacattggccgcaaattgcacaatttgcccccagcgcttcagcgttcttcggaatgtcgcgcattggcatggaagtcacaccttcgggaacgtggttgacctacacaggtgccatcaaattggatgacaaagatccaaatttcaaagatcaagtcattttgctgaataagcatattgacgcatacaaaacattcccaccaacagagcctaaaaaggacaaaaagaagaaggctgatgaaactcaagccttaccgcagagacagaagaaacagcaaactgtgactcttcttcctgctgcagatttggatgatttctccaaacaattgcaacaatccatgagcagtgctgactcaactcaggcctaaactcatgcagaccacacaaggcagatgggctatataaacgttttcgcttttccgtttacgatatatagtctactcttgtgcagaatgaattctcgtaactacatagcacaagtagatgtagttaactttaatctcacatagcaatctttaatcagtgtgtaacattagggaggacttgaaagagccaccacattttcaccgaggccacgcggagtacgatcgagtgtacagtgaacaatgctagggagagctgcctatatggaagagccctaatgtgtaaaattaattttagtagtgctatccccatgtgattttaatagcttcttaggagaatgacaaaaaaaaaaaaaaaaaaaaaaaaaaaaaaaaaaaaaaaaaaaaaaaaaaaaaaaaaaagggtcggcatggcatctccacctcctcgcggtccgacctgggcatccgaaggaggacgcacgtccactcggatggctaagggagcagcacactggcggccgttactagggccgcgcccttcccaacagttgcgcagcctgaatggcgaatggagatccaatttttaagtgtataatgtgttaaactactgattctaattgtttgtgtattttagattcacagtcccaaggctcatttcaggcccctcagtcctcacagtctgttcatgatcataatcagccataccacatttgtagaggttttacttgctttaaaaaacctcccacacctccccctgaacctgaaacataaaatgaatgcaattgttgttgttaacttgtttattgcagcttataatggttacaaataaagcaatagcatcacaaatttcacaaataaagcatttttttcactgcattctagttgtggtttgtccaaactcatcaatgtatcttaaagcttgagtattctatagtctcacctaaatagcttggcgtaatcatggtcatagctgtttcctgtgtgaaattgttatccgctcacaattccacacaacatacgagccggaagcataaagtgtaaagcctggggtgcctaatgagtgagctaactcacattaattgcgttgcgctcactgcccgctttccagtcgggaaacctgtcgtgccagctgcattaatgaatcggccaacgcgaaccccttgcggccgcccgggccgtcgaccaattctcatgtttgacagcttatcatcgaatttctgccattcatccgcttattatcacttattcaggcgtagcaaccaggcgtttaagggcaccaataactgccttaaaaaaattacgccccgccctgccactcatcgcagtactgttgtaattcattaagcattctgccgacatggaagccatcacaaacggcatgatgaacctgaatcgccagcggcatcagcaccttgtcgccttgcgtataatatttgcccatggtgaaaacgggggcgaagaagttgtccatattggccacgtttaaatcaaaactggtgaaactcacccagggattggctgagacgaaaaacatattctcaataaaccctttagggaaataggccaggttttcaccgtaacacgccacatcttgcgaatatatgtgtagaaactgccggaaatcgtcgtggtattcactccagagcgatgaaaacgtttcagtttgctcatggaaaacggtgtaacaagggtgaacactatcccatatcaccagctcaccgtctttcattgccatacgaaattccggatgagcattcatcaggcgggcaagaatgtgaataaaggccggataaaacttgtgcttatttttctttacggtctttaaaaaggccgtaatatccagctgaacggtctggttataggtacattgagcaactgactgaaatgcctcaaaatgttctttacgatgccattgggatatatcaacggtggtatatccagtgatttttttctccattttagcttccttagctcctgaaaatctcgataactcaaaaaatacgcccggtagtgatcttatttcattatggtgaaagttggaacctcttacgtgccgatcaacgtctcattttcgccaaaagttggcccagggcttcccggtatcaacagggacaccaggatttatttattctgcgaagtgatcttccgtcacaggtatttattcgcgataagctcatggagcggcgtaaccgtcgcacaggaaggacagagaaagcgcggatctgggaagtgacggacagaacggtcaggacctggattggggaggcggttgccgccgctgctgctgacggtgtgacgttctctgttccggtcacaccacatacgttccgccattcctatgcgatgcacatgctgtatgccggtataccgctgaaagttctgcaaagcctgatgggacataagtccatcagttcaacggaagtctacacgaaggtttttgcgctggatgtggctgcccggcaccgggtgcagtttgcgatgccggagtctgatgcggttgcgatgctgaaacaattatcctgagaataaatgccttggcctttatatggaaatgtggaactgagtggatatgctgtttttgtctgttaaacagagaagctggctgttatccactgagaagcgaacgaaacagtcgggaaaatctcccattatcgtagagatccgcattattaatctcaggagcctgtgtagcgtttataggaagtagtgttctgtcatgatgcctgcaagcggtaacgaaaacgatttgaatatgccttcaggaacaatagaaatcttcgtgcggtgttacgttgaagtggagcggattatgtcagcaatggacagaacaacctaatgaacacagaaccatgatgtggtctgtccttttacagccagtagtgctcgccgcagtcgagcgacagggcgaagccctcggctggttgccctcgccgctgggctggcggccgtctatggccctgcaaacgcgccagaaacgccgtcgaagccgtgtgcgagacaccgcggccggccgccggcgttgtggatacctcgcggaaaacttggccctcactgacagatgaggggcggacgttgacacttgaggggccgactcacccggcgcggcgttgacagatgaggggcaggctcgatttcggccggcgacgtggagctggccagcctcgcaaatcggcgaaaacgcctgattttacgcgagtttcccacagatgatgtggacaagcctggggataagtgccctgcggtattgacacttgaggggcgcgactactgacagatgaggggcgcgatccttgacacttgaggggcagagtgctgacagatgaggggcgcacctattgacatttgaggggctgtccacaggcagaaaatccagcatttgcaagggtttccgcccgtttttcggccaccgctaacctgtcttttaacctgcttttaaaccaatatttataaaccttgtttttaaccagggctgcgccctgtgcgcgtgaccgcgcacgccgaaggggggtgcccccccttctcgaaccctcccggtcgagtgagcgaggaagcaccagggaacagcacttatatattctgcttacacacgatgcctgaaaaaacttcccttggggttatccacttatccacggggatatttttataattattttttttatagtttttagatcttcttttttagagcgccttgtaggcctttatccatgctggttctagagaaggtgttgtgacaaattgccctttcagtgtgacaaatcaccctcaaatgacagtcctgtctgtgacaaattgcccttaaccctgtgacaaattgccctcagaagaagctgttttttcacaaagttatccctgcttattgactcttttttatttagtgtgacaatctaaaaacttgtcacacttcacatggatctgtcatggcggaaacagcggttatcaatcacaagaaacgtaaaaatagcccgcgaatcgtccagtcaaacgacctcactgaggcggcatatagtctctcccgggatcaaaaacgtatgctgtatctgttcgttgaccagatcagaaaatctgatggcaccctacaggaacatgacggtatctgcgagatccatgttgctaaatatgctgaaatattcggattgacctctgcggaagccagtaaggatatacggcaggcattgaagagtttcgcggggaaggaagtggttttttatcgccctgaagaggatgccggcgatgaaaaaggctatgaatcttttccttggtttatcaaacgtgcgcacagtccatccagagggctttacagtgtacatatcaacccatatctcattcccttctttatcgggttacagaaccggtttacgcagtttcggcttagtgaaacaaaagaaatcaccaatccgtatgccatgcgtttatacgaatccctgtgtcagtatcgtaagccggatggctcaggcatcgtctctctgaaaatcgactggatcatagagcgttaccagctgcctcaaagttaccagcgtatgcctgacttccgccgccgcttcctgcaggtctgtgttaatgagatcaacagcagaactccaatgcgcctctcatacattgagaaaaagaaaggccgccagacgactcatatcgtattttccttccgcgatatcacttccatgacgacaggatagtctgagggttatctgtcacagatttgagggtggttcgtcacatttgttctgacctactgagggtaatttgtcacagttttgctgtttccttcagcctgcatggattttctcatactttttgaactgtaatttttaaggaagccaaatttgagggcagtttgtcacagttgatttccttctctttcccttcgtcatgtgacctgatatcgggggttagttcgtcatcattgatgagggttgattatcacagtttattactctgaattggctatccgcgtgtgtacctctacctggagtttttcccacggtggatatttcttcttgcgctgagcgtaagagctatctgacagaacagttcttctttgcttcctcgccagttcgctcgctatgctcggttacacggctgcggcg

SEQ ID NO: 20 - DNA, 35283 bp, Artificial Sequence
  Clone pCCI-4K-SARS-CoV-2-WDWDD. Based on SARS-CoV-2.
gatgtgctgcaaggcgattaagttgggtaacgccagggttttcccagtcacgacgttgtaaaacgacggccagtgaattgtaatacgactcactatagggcgaattctagttattaatagtaatcaattacggggtcattagttcatagcccatatatggagttccgcgttacataacttacggtaaatggcccgcctggctgaccgcccaacgacccccgcccattgacgtcaataatgacgtatgttcccatagtaacgccaatagggactttccattgacgtcaatgggtggagtatttacggtaaactgcccacttggcagtacatcaagtgtatcatatgccaagtacgccccctattgacgtcaatgacggtaaatggcccgcctggcattatgcccagtacatgaccttatgggactttcctacttggcagtacatctacgtattagtcatcgctattaccatggtgatgcggttttggcagtacatcaatgggcgtggatagcggtttgactcacggggatttccaagtctccaccccattgacgtcaatgggagtttgttttggcaccaaaatcaacgggactttccaaaatgtcgtaacaactccgccccattgacgcaaatgggcggtaggcgtgtacggtgggaggtctatataagcagagctggtttagtgaaccgtattaaaggtttataccttcccaggtaacaaaccaaccaactttcgatctcttgtagatctgttctctaaacgaactttaaaatctgtgtggctgtcactcggctgcatgcttagtgcactcacgcagtataattaataactaattactgtcgttgacaggacacgagtaactcgtctatcttctgcaggctgcttacggtttcgtccgtgttgcagccgatcatcagcacatctaggtttcgtccgggtgtgaccgaaaggtaagatggagagccttgtccctggtttcaacgagaaaacacacgtccaactcagtttgcctgttttacaggttcgcgacgtgctcgtacgtggctttggagactccgtggaggaggtcttatcagaggcacgtcaacatcttaaagatggcacttgtggcttagtagaagttgaaaaaggcgttttgcctcaacttgaacagccctatgtgttcatcaaacgttcggatgctcgaactgcacctcatggtcatgttatggttgagctggtagcagaactcgaaggcattcagtacggtcgtagtggtgagacacttggtgtccttgtccctcatgtgggcgaaataccagtggcttaccgcaaggttcttcttcgtaagaacggtaataaaggagctggtggccatagttacggcgccgatctaaagtcatttgacttaggcgacgagcttggcactgatccttatgaagattttcaagaaaactggaacactaaacatagcagtggtgttacccgtgaactcatgcgtgagcttaacggaggggcatacactcgctatgtcgataacaacttctgtggccctgatggctaccctcttgagtgcattaaagaccttctagcacgtgctggtaaagcttcatgcactttgtccgaacaactggactttattgacactaagaggggtgtatactgctgccgtgaacatgagcatgaaattgcttggtacacggaacgttctgaaaagagctatgaattgcagacaccttttgaaattaaattggcaaagaaatttgacaccttcaatggggaatgtccaaattttgtatttcccttaaattccataatcaagactattcaaccaagggttgaaaagaaaaagcttgatggctttatgggtagaattcgatctgtctatccagttgcgtcaccaaatgaatgcaaccaaatgtgcctttcaactctcatgaagtgtgatcattgtggtgaaacttcatggcagacgggcgattttgttaaagccacttgcgaattttgtggcactgagaatttgactaaagaaggtgccactacttgtggttacttaccccaaaatgctgttgttaaaatttattgtccagcatgtcacaattcagaagtaggacctgagcatagtcttgccgaataccataatgaatctggcttgaaaaccattcttcgtaagggtggtcgcactattgcctttggaggctgtgtgttctcttatgttggttgccataacaagtgtgcctattgggtcccacgtgctagcgctaacataggttgtaaccatacaggtgttgttggagaaggttccgaaggtcttaatgacaaccttcttgaaatactccaaaaagagaaagtcaacatcaatattgttggtgactttaaacttaatgaagagatcgccattattttggcatctttttctgcttccacaagtgcttttgtggaaactgtgaaaggtttggattataaagcattcaaacaaattgttgaatcctgtggtaattttaaagttacaaaaggaaaagctaaaaaaggtgcctggaatattggtgaacagaaatcaatactgagtcctctttatgcatttgcatcagaggctgctcgtgttgtacgatcaattttctcccgcactcttgaaactgctcaaaattctgtgcgtgttttacagaaggccgctataacaatactagatggaatttcacagtattcactgagactcattgatgctatgatgttcacatctgatttggctactaacaatctagttgtaatggcctacattacaggtggtgttgttcagttgacttcgcagtggctaactaacatctttggcactgtttatgaaaaactcaaacccgtccttgattggcttgaagagaagtttaaggaaggtgtagagtttcttagagacggttgggaaattgttaaatttatctcaacctgtgcttgtgaaattgtcggtggacaaattgtcacctgtgcaaaggaaattaaggagagtgttcagacattctttaagcttgtaaataaatttttggctttgtgtgctgactctatcattattggtggagctaaacttaaagccttgaatttaggtgaaacatttgtcacgcactcaaagggattgtacagaaagtgtgttaaatccagagaagaaactggcctactcatgcctctaaaagccccaaaagaaattatcttcttagagggagaaacacttcccacagaagtgttaacagaggaagttgtcttgaaaactggtgatttacaaccattagaacaacctactagtgaagctgttgaagctccattggttggtacaccagtttgtattaacgggcttatgttgctcgaaatcaaagacacagaaaagtactgtgcccttgcacctaatatgatggtaacaaacaataccttcacactcaaaggcggtgcaccaacaaaggttacttttggtgatgacactgtgatagaagtgcaaggttacaagagtgtgaatatcacttttgaacttgatgaaaggattgataaagtacttaatgagaagtgctctgcctatacagttgaactcggtacagaagtaaatgagttcgcctgtgttgtggcagatgctgtcataaaaactttgcaaccagtatctgaattacttacaccactgggcattgatttagatgagtggagtatggctacatactacttatttgatgagtctggtgagtttaaattggcttcacatatgtattgttctttctaccctccagatgaggatgaagaagaaggtgattgtgaagaagaagagtttgagccatcaactcaatatgagtatggtactgaagatgattaccaaggtaaacctttggaatttggtgccacttctgctgctcttcaacctgaagaagagcaagaagaagattggttagatgatgatagtcaacaaactgttggtcaacaagacggcagtgaggacaatcagacaactactattcaaacaattgttgaggttcaacctcaattagagatggaacttacaccagttgttcagactattgaagtgaatagttttagtggttatttaaaacttactgacaatgtatacattaaaaatgcagacattgtggaagaagctaaaaaggtaaaaccaacagtggttgttaatgcagccaatgtttaccttaaacatggaggaggtgttgcaggagccttaaataaggctactaacaatgccatgcaagttgaatctgatgattacatagctactaatggaccacttaaagtgggtggtagttgtgttttaagcggacacaatcttgctaaacactgtcttcatgttgtcggcccaaatgttaacaaaggtgaagacattcaacttcttaagagtgcttatgaaaattttaatcagcacgaagttctacttgcaccattattatcagctggtatttttggtgctgaccctatacattctttaagagtttgtgtagatactgttcgcacaaatgtctacttagctgtctttgataaaaatctctatgacaaacttgtttcaagctttttggaaatgaagagtgaaaagcaagttgaacaaaagatcgctgagattcctaaagaggaagttaagccatttataactgaaagtaaaccttcagttgaacagagaaaacaagatgataagaaaatcaaagcttgtgttgaagaagttacaacaactctggaagaaactaagttcctcacagaaaacttgttactttatattgacattaatggcaatcttcatccagattctgccactcttgttagtgacattgacatcactttcttaaagaaagatgctccatatatagtgggtgatgttgttcaagagggtgttttaactgctgtggttatacctactaaaaaggctggtggcactactgaaatgctagcgaaagctttgagaaaagtgccaacagacaattatataaccacttacccgggtcaaggtttaaatggttatacggtagaagaagcgaaaacggtactaaaaaaatgtaaatcggcgttttatatactaccgtcgataatatcgaatgaaaaacaagaaatactaggtacggtatcgtggaatttacgtgaaatgctagcgcatgcggaagaaacacgtaaattaatgccggtatgtgtagaaacgaaagcgatagtatcgacgatacaacgtaaatataaaggtataaaaatacaagaaggtgtagtagattatggtgcgcgtttttatttttatacgtcgaaaacgacggtagcgtcgctaataaatacgctaaatgatctaaatgaaacgctagtaacgatgccgctaggttatgtaacgcatggtttaaatttagaagaagcggcgcgttatatgcgttcgctaaaagtaccggcgacggtatcggtatcgtcgccggatgcggtaacggcgtataatggttatctaacgtcgtcgtcgaaaacgccggaagaacattttatagaaacgatatcgctagcgggttcgtataaagattggtcgtattcgggtcaatcgacgcaactaggtatagaatttctaaaacgtggtgataaatcggtatattatacgtcgaatccgacgacgtttcatctagatggtgaagtaataacgtttgataatctaaaaacgctactatcgttacgtgaagtacgtacgataaaagtatttacgacggtagataatataaatctacatacgcaagtagtagatatgtcgatgacatatggacaacaatttggtccgacgtatttagatggtgcggatgttacgaaaataaaaccgcataattcgcatgaaggtaaaacgttttatgtattaccgaatgatgatacgctacgtgtagaagcgtttgaatattatcatacgactgatccgtcgtttctaggtcgttatatgtcggcgttaaatcatacgaaaaaatggaaatatccgcaagtaaatggtttaacgtcgataaaatgggcggataataattgttatctagcgacggcgttattaacgctacaacaaatagaattaaaatttaatccgccggcgctacaagatgcgtattatcgtgcgcgtgcgggtgaagcggcgaatttttgtgcgctaatattagcgtattgtaataaaacggtaggtgaattaggtgatgtacgtgaaacgatgtcgtatttatttcaacatgcgaatttagattcgtgtaaacgtgtattaaatgtagtatgtaaaacgtgtggtcaacaacaaacgacgctaaaaggtgtagaagcggtaatgtatatgggtacgctatcgtatgaacaatttaaaaaaggtgtacaaataccgtgtacgtgtggtaaacaagcgacgaaatatctagtacaacaagaatcgccgtttgtaatgatgtcggcgccgccggcgcaatatgaactaaaacatggtacgtttacgtgtgcgtcggaatatacgggtaattatcaatgtggtcattataaacatataacgtcgaaagaaacgttatattgtatagatggtgcgttacttacgaaatcgtcggaatataaaggtccgataacggatgtattttataaagaaaattcgtatacgacgacgataaaaccggtaacgtataaattagatggtgtagtatgtacggaaatagatccgaaattagataattattataaaaaagataattcgtattttacggaacaaccgatagatctagtaccgaatcaaccatatccgaatgcgtcgtttgataattttaaatttgtatgtgataatataaaatttgcggatgatttaaatcaattaacgggttataaaaaaccggcgtcgcgtgaactaaaagtaacgttttttccggatttaaatggtgatgtagtagcgatagattataaacattatacgccgtcgtttaaaaaaggtgcgaaattattacataaaccgatagtatggcatgtaaataatgcgacgaataaagcgacgtataaaccgaatacgtggtgtatacggtgtctatggagcacgaaaccggtagaaacgtcgaattcgtttgatgtactaaaatcggaagatgcgcaaggtatggataatctagcgtgtgaagatctaaaaccggtatcggaagaagtagtagaaaatccgacgatacaaaaagatgtactggaatgtaatgtaaaaacgacggaagtagtaggtgatataatactaaaaccggctaataattcgttaaaaataacggaagaagtaggtcatacggatctaatggcggcgtatgtagataattcgtcgctaacgataaaaaaaccgaatgaattatcgcgtgtattaggtttaaaaacgctagcgacgcatggtttagctgctgtaaattcggtaccgtgggatacgatagcgaattatgcgaaaccgtttctaaataaagtagtatcgacgacgacgaatatagtaacgcgatgtttaaatcgtgtatgtacgaattatatgccgtatttttttacgttattactacaattatgtacgtttacgcgatcgacgaattcgcgtataaaagcgtcgatgccgacgacgatagcgaaaaatacggtaaaatcggtaggtaaattttgtctagaagcgtcgtttaattatttaaaatcgccgaatttttctaaactaataaatataataatatggtttttactattatcggtatgcctaggttctttaatctactcaaccgctgctttaggtgttttaatgtctaatttaggcatgccttcttactgtactggttacagagaaggctatttgaactctactaatgtcactattgcaacctactgtactggttctataccttgtagtgtttgtcttagtggtttagattctttagacacctatccttctttagaaactatacaaattaccatttcatcttttaaatgggatttaactgcttttggcttagttgcagagtggtttttggcatatattcttttcactaggtttttctatgtacttggattggctgcaatcatgcaattgtttttcagctattttgcagtacattttattagtaattcttggcttatgtggttaataattaatcttgtacaaatggccccgatttcagctatggttagaatgtacatcttctttgcatcattttattatgtatggaaaagttatgtgcatgttgtagacggttgtaattcatcaacttgtatgatgtgttacaaacgtaatagagcaacaagagtcgaatgtacaactattgttaatggtgttagaaggtccttttatgtctatgctaatggaggtaaaggcttttgcaaactacacaattggaattgtgttaattgtgatacattctgtgctggtagtacatttattagtgatgaagttgcgagagacttgtcactacagtttaaaagaccaataaatcctactgaccagtcttcttacatcgttgatagtgttacagtgaagaatggttccatccatctttactttgataaagctggtcaaaagacttatgaaagacattctctctctcattttgttaacttagacaacctgagagctaataacactaaaggttcattgcctattaatgttatagtttttgatggtaaatcaaaatgtgaagaatcatctgcaaaatcagcgtctgtttactacagtcagcttatgtgtcaacctatactgttactagatcaggcattagtgtctgatgttggtgatagtgcggaagttgcagttaaaatgtttgatgcttacgttaatacgttttcatcaacttttaacgtaccaatggaaaaactcaaaacactagttgcaactgcagaagctgaacttgcaaagaatgtgtccttagacaatgtcttatctacttttatttcagcagctcggcaagggtttgttgattcagatgtagaaactaaagatgttgttgaatgtcttaaattgtcacatcaatctgacatagaagttactggcgatagttgtaataactatatgctcacctataacaaagttgaaaacatgacaccccgtgaccttggtgcttgtattgactgtagtgcgcgtcatattaatgcgcaggtagcaaaaagtcacaacattgctttgatatggaacgttaaagatttcatgtcattgtctgaacaactacgaaaacaaatacgtagtgctgctaaaaagaataacttaccttttaagttgacatgtgcaactactagacaagttgttaatgttgtaacaacaaagatagcacttaagggtggtaaaattgttaataattggttgaagcagttaattaaagtaacgctagtatttctatttgtagcggcgatattttatttaataacgccggtacatgtaatgtcgaaacatacggatttttcgtcggaaataataggttataaagcgatagatggtggtgtaactcgtgatatagcgtcgacggatacgtgttttgcgaataaacatgcggattttgatacgtggttttcgcaacgtggtggttcgtatacgaatgataaagcgtgtccgttaatagcggcggtaataacacgtgaagtaggttttgtagtaccgggtttaccgggtacgatattacgtacgacgaatggtgattttttacattttttaccgcgtgtattttcggcggtaggtaatatatgttatacgccgtcgaaactaatagaatatacggattttgcgacgtcggcgtgtgtattagcggcggaatgtacgatatttaaagatgcgtcgggtaaaccggtaccgtattgttatgatacgaatgtactagaaggttcggtagcgtatgaatcgttacgcccggatacacgttatgtactaatggatggttcgataatacaatttccgaatacgtatctagaaggttcggtacgtgtagtaacgacgtttgattcggaatattgtcgtcatggtacgtgtgaacgttcggaagcgggtgtatgtgtatcgacgtcggggcgttgggtactaaataatgattattatcgttcgttaccgggtgtattctgtggtgtagatgcggtaaatttactaacgaatatgtttacgccgctgatacaaccgataggtgcgttagatatatcggcgtcgatagtagcgggtggtatagtagcgatagtagtaacgtgtctagcgtattattttatgcgttttcgtcgtgcgtttggtgaatattcgcatgtagtagcgtttaatacgttactatttctaatgtcttttacagtactatgtttaacgccggtatattcttttttaccgggtgtatattcggtaatatatttatatttaacgttttatctaacgaatgatgtatcgtttttagcgcatatacaatggatggtaatgtttacgccgttagtaccgttttggataacaatagcgtatataatatgtatatcgacgaaacatttttattggtttttttcgaattatctgaaacgtcgtgtagtatttaatggtgtatctttttcgacgtttgaagaagcggcgctatgtacatttttattaaataaagaaatgtatctaaaattacgttcggatgtactattaccgctaacgcaatataatcgttatttagcgctatataataaatataaatatttttcgggtgcgatggatacgacgtcgtatcgtgaagcggcgtgttgtcatctagcgaaagcgctaaatgatttttcgaattcgggttcggatgtactatatcaaccgccgcaaacgtcgataacgtcggcggtattacaatcgggttttcgtaaaatggcgtttccgtcgggtaaagtagaaggttgtatggtacaagtaacgtgtggtacgacgacgctaaatggtctatggctagatgatgtagtatattgtccgcgtcatgtaatatgtacgtcggaagatatgctaaatccgaattatgaagatttactaatacgtaaatcgaatcataattttttagtacaagcgggtaatgtacaactacgtgtaataggtcattcgatgcaaaattgtgtactaaaactaaaagtagatacggcgaatccgaaaacaccgaaatataaatttgtacgtatacaaccgggtcaaacgttttcggtattagcgtgttataatggttctccgtcgggtgtatatcaatgtgcgatgcgtccgaattttacgattaaaggttcgtttctaaatggttcgtgtggttcggtaggttttaatatagattatgattgtgtatcgttttgttatatgcatcatatggaattaccgacgggtgtacatgcgggtacggatttagaaggtaatttttatggtccgtttgtagatcgtcaaacagcgcaagcggcgggtacggatacgacgattacggtaaatgtattagcgtggttatatgcggcggtaataaatggtgatcgttggtttctaaatcgttttacgacgacgctaaatgattttaatctagtagcgatgaaatataattatgaaccgctgacacaagatcatgtagatatactaggtccgctatcggcgcaaacgggtatagcggtattagatatgtgtgcgtcgttaaaagaattactacaaaatggtatgaatggtcgtacgatattaggttcggcgttattagaagatgaatttacgccgtttgatgtagtacgtcaatgttcgggtgtaacgtttcaatcggcggtaaaacgtacgataaaaggtacgcatcattggttattactaacgatattaacgtcgctattagtattagtacaatcgacgcaatggtcgttatttttttttttatatgaaaatgcgtttttaccgtttgcgatgggtataatagcgatgtcggcgtttgcgatgatgtttgtaaaacataagcatgcgtttctatgtttatttttattaccgtcgctagcgacggtagcgtattttaatatggtatatatgccggcgtcgtgggtaatgcgtataatgacgtggttagatatggtagatacgtcgttatcgggttttaaactaaaagattgtgtaatgtatgcgtcggcggtagtattactaatactaatgacggcgcgtacggtatatgatgatggtgcgcgtcgtgtatggacgctaatgaatgtattaacgctagtatataaagtatattatgggaatgcgttagatcaagcgatatcgatgtgggcgctaataatatcggtaacgtcgaattattcgggtgtagtaacgacggtaatgtttttagcgcgtggtatagtatttatgtgtgtagaatattgtccgatattttttataacgggtaatacactacaatgtataatgctagtatattgttttttaggttatttttgtacgtgttattttggtctattttgtttactaaatcgttattttcgtctaacactaggtgtatatgattatttagtatcgacgcaagaatttcgttatatgaattcgcaaggtctactaccgccgaaaaattcgatagatgcgtttaaactaaatataaaattattaggtgtaggtggtaaaccgtgtataaaagtagcgacggtacaatcgaaaatgtcggatgtaaaatgtacatcggtagtattactatcggtattacaacaactacgtgtagaatcgtcgtcgaaattatgggcgcaatgtgtacaattacataatgatatactattagcgaaagatacgacggaagcgtttgaaaaaatggtatcgctactatcggtattactatcgatgcaaggtgcggtagatataaataaactatgtgaagaaatgctagataatcgtgcgacgttacaagcgatagcgtcggaattttcgtcgctaccgtcgtatgcggcgtttgcgacggcgcaagaagcgtatgaacaagcggtagcgaatggtgattcggaagtagtactaaaaaaattaaaaaaatcgttaaatgtagcgaaatcggaatttgatcgtgatgcggcgatgcaacgtaaattagaaaaaatggcggatcaagcgatgacgcaaatgtataaacaagcgcgttcggaagataaacgtgcgaaagtaacgtcggcgatgcaaacgatgctatttacgatgctacgtaaattagataatgatgcgctaaataatataataaataatgcgcgtgatggttgtgtaccgttaaatataataccgctaacgacggcggcgaaactaatggtagtaataccggattataatacatataaaaatacgtgtgatggtacgacgtttacgtatgcgtcggcgttatgggaaatacaacaagtagtagatgcggattcgaaaatagtacaactatcggaaatatcgatggataattcgccgaatttagcgtggccgctaatagtaacggcgttacgtgcgaattcggcggtaaaattacaaaataatgaactatcgccggtagcgctacgacagatgtcttgtgctgccggtactacacaaactgcttgcactgatgacaatgcgttagcttactacaacacaacaaagggaggtaggtttgtacttgcactgttatccgatttacaggatttgaaatgggctagattccctaagagtgatggaactggtactatctatacagaactggaaccaccttgtaggtttgttacagacacacctaaaggtcctaaagtgaagtatttatactttattaaaggattaaacaacctaaatagaggtatggtacttggtagtttagctgccacagtacgtctacaagctggtaatgcaacagaagtgcctgccaattcaactgtattatctttctgtgcttttgctgtagatgctgctaaagcttacaaagattatctagctagtgggggacaaccaatcactaattgtgttaagatgttgtgtacacacactggtactggtcaggcaataacagttacaccggaagccaatatggatcaagaatcctttggtggtgcatcgtgttgtctgtactgccgttgccacatagatcatccaaatcctaaaggattttgtgacttaaaaggtaagtatgtacaaatacctacaacttgtgctaatgaccctgtgggttttacacttaaaaacacagtctgtaccgtctgcggtatgtggaaaggttatggctgtagttgtgatcaactccgcgaacccatgcttcagtcagctgatgcacaatcgtttttaaacgggtttgcggtgtaagtgcagcccgtcttacaccgtgcggcacaggcactagtactgatgtcgtatacagggcttttgacatctacaatgataaagtagctggttttgctaaattcctaaaaactaattgttgtcgcttccaagaaaaggacgaagatgacaatttaattgattcttactttgtagttaagagacacactttctctaactaccaacatgaagaaacaatttataatttacttaaggattgtccagctgttgctaaacatgacttctttaagtttagaatagacggtgacatggtaccacatatatcacgtcaacgtcttactaaatacacaatggcagacctcgtctatgctttaaggcattttgatgaaggtaattgtgacacattaaaagaaatacttgtcacatacaattgttgtgatgatgattatttcaataaaaaggactggtatgattttgtagaaaacccagatatattacgcgtatacgccaacttaggtgaacgtgtacgccaagctttgttaaaaacagtacaattctgtgatgccatgcgaaatgctggtattgttggtgtactgacattagataatcaagatctcaatggtaactggtatgatttcggtgatttcatacaaaccacgccaggtagtggagttcctgttgtagattcttattattcattgttaatgcctatattaaccttgaccagggctttaactgcagagtcacatgttgacactgacttaacaaagccttacattaagtgggatttgttaaaatatgacttcacggaagagaggttaaaactctttgaccgttattttaaatattgggatcagacataccacccaaattgtgttaactgtttggatgacagatgcattctgcattgtgcaaactttaatgttttattctctacagtgttcccacctacaagttttggaccactagtgagaaaaatatttgttgatggtgttccatttgtagtttcaactggataccacttcagagagctaggtgttgtacataatcaggatgtaaacttacatagctctagacttagttttaaggaattacttgtgtatgctgctgaccctgctatgcacgctgcttctggtaatctattactagataaacgcactacgtgcttttcagtagctgcacttactaacaatgttgcttttcaaactgtcaaacccggtaattttaacaaagacttctatgactttgctgtgtctaagggtttctttaaggaaggaagttctgttgaattaaaacacttcttctttgctcaggatggtaatgctgctatcagcgattatgactactatcgttataatctaccaacaatgtgtgatatcagacaactactatttgtagttgaagttgttgataagtactttgattgttacgatggtggctgtattaatgctaaccaagtcatcgtcaacaacctagacaaatcagctggttttccatttaataaatggggtaaggctagactttattatgattcaatgagttatgaggatcaagatgcacttttcgcatatacaaaacgtaatgtcatccctactataactcaaatgaatcttaagtatgccattagtgcaaagaatagagctcgcaccgtagctggtgtctctatctgtagtactatgaccaatagacagtttcatcaaaaattattgaaatcaatagccgccactagaggagctactgtagtaattggaacaagcaaattctatggtggttggcacaacatgttaaaaactgtttatagtgatgtagaaaaccctcaccttatgggttgggattatcctaaatgtgatagagccatgcctaacatgcttagaattatggcctcacttgttcttgctcgcaaacatacaacgtgttgtagcttgtcacaccgtttctatagattagctaatgagtgtgctcaagtattgagtgaaatggtcatgtgtggcggttcactatatgttaaaccaggtggaacctcatcaggagatgccacaactgcttatgctaatagtgtttttaacatttgtcaagctgtcacggccaatgttaatgcacttttatctactgatggtaacaaaattgccgataagtatgtccgcaatttacaacacagactttatgagtgtctctatagaaatagagatgttgacacagactttgtgaatgagttttacgcatatttgcgtaaacatttctcaatgatgatactctctgacgatgctgttgtgtgtttcaatagcacttatgcatctcaaggtctagtggctagcataaagaactttaagtcagttctttattatcaaaacaatgtttttatgtctgaagcaaaatgttggactgagactgaccttactaaaggacctcatgaattttgctctcaacatacaatgctagttaaacagggtgatgattatgtgtaccttccttacccagatccatcaagaatcctaggggccggctgttttgtagatgatatcgtaaaaacagatggtacacttatgattgaacggttcgtgtctttagctatagatgcttacccacttactaaacatcctaatcaggagtatgctgatgtctttcatttgtacttacaatacataagaaagctacatgatgagttaacaggacacatgttagacatgtattctgttatgcttactaatgataacacttcaaggtattgggaacctgagttttatgaggctatgtacacaccgcatacagtcttacaggctgttggggcttgtgttctttgcaattcacagacttcattaagatgtggtgcttgcatacgtagaccattcttatgttgtaaatgctgttacgaccatgtcatatcaacatcacataaattagtcttgtctgttaatccgtatgtttgcaatgctccaggttgtgatgtcacagatgtgactcaactttacttaggaggtatgagctattattgtaaatcacataaaccacccattagttttccattgtgtgctaatggacaagtttttggtttatataaaaatacatgtgttggtagcgataatgttactgactttaatgcaattgcaacatgtgactggacaaatgctggtgattacattttagctaacacctgtactgaaagactcaagctttttgcagcagaaacgctcaaagctactgaggagacatttaaactgtcttatggtattgctactgtacgtgaagtgctgtctgacagagaattacatctttcatgggaagttggtaaacctagaccaccacttaaccgaaattatgtctttactggttatcgtgtaactaaaaacagtaaagtacaaataggagagtacacctttgaaaaaggtgactatggtgatgctgttgtttaccgaggtacaacaacttacaaattaaatgttggtgattattttgtgctgacatcacatacagtaatgccattaagtgcacctacactagtgccacaagagcactatgttagaattactggcttatacccaacactcaatatctcagatgagttttctagcaatgttgcaaattatcaaaaggttggtatgcaaaagtattctacactccagggaccacctggtactggtaagagtcattttgctattggcctagctctctactacccttctgctcgcatagtgtatacagcttgctctcatgccgctgttgatgcactatgtgagaaggcattaaaatatttgcctatagataaatgtagtagaattatacctgcacgtgctcgtgtagagtgttttgataaattcaaagtgaattcaacattagaacagtatgtcttttgtactgtaaatgcattgcctgagacgacagcagatatagttgtctttgatgaaatttcaatggccacaaattatgatttgagtgttgtcaatgccagattacgtgctaagcactatgtgtacattggcgaccctgctcaattacctgcaccacgcacattgctaactaagggcacactagaaccagaatatttcaattcagtgtgtagacttatgaaaactataggtccagacatgttcctcggaacttgtcggcgttgtcctgctgaaattgttgacactgtgagtgctttggtttatgataataagcttaaagcacataaagacaaatcagctcaatgctttaaaatgttttataagggtgttatcacgcatgatgtttcatctgcaattaacaggccacaaataggcgtggtaagagaattccttacacgtaaccctgcttggagaaaagctgtctttatttcaccttataattcacagaatgctgtagcctcaaagattttgggactaccaactcaaactgttgattcatcacagggctcagaatatgactatgtcatattcactcaaaccactgaaacagctcactcttgtaatgtaaacagatttaatgttgctattaccagagcaaaagtaggcatactttgcataatgtctgatagagacctttatgacaagttgcaatttacaagtcttgaaattccacgtaggaatgtggcaactttacaagctgaaaatgtaacaggactctttaaagattgtagtaaggtaatcactgggttacatcctacacaggcacctacacacctcagtgttgacactaaattcaaaactgaaggtttatgtgttgacatacctggcatacctaaggacatgacctatagaagactcatctctatgatgggttttaaaatgaattatcaagttaatggttaccctaacatgtttatcacccgcgaagaagctataagacatgtacgtgcatggattggcttcgatgtcgaggggtgtcatgctactagagaagctgttggtaccaatttacctttacagctaggtttttctacaggtgttaacctagttgctgtacctacaggttatgttgatacacctaataatacagatttttccagagttagtgctaaaccaccgcctggagatcaatttaaacacctcataccacttatgtacaaaggacttccttggaatgtagtgcgtataaagattgtacaaatgttaagtgacacacttaaaaatctctctgacagagtcgtatttgtcttatgggcacatggctttgagttgacatctatgaagtattttgtgaaaataggacctgagcgcacctgttgtctatgtgatagacgtgccacatgcttttccactgcttcagacacttatgcctgttggcatcattctattggatttgattacgtctataatccgtttatgattgatgttcaacaatggggttttacaggtaacctacaaagcaaccatgatctgtattgtcaagtccatggtaatgcacatgtagctagttgtgatgcaatcatgactaggtgtctagctgtccacgagtgctttgttaagcgtgttgactggactattgaatatcctataattggtgatgaactgaagattaatgcggcttgtagaaaggttcaacacatggttgttaaagctgcattattagcagacaaattcccagttcttcacgacattggtaaccctaaagctattaagtgtgtacctcaagctgatgtagaatggaagttctatgatgcacagccttgtagtgacaaagcttataaaatagaagaattattctattcttatgccacacattctgacaaattcacagatggtgtatgcctattttggaattgcaatgtcgatagatatcctgctaattccattgtttgtagatttgacactagagtgctatctaaccttaacttgcctggttgtgatggtggcagtttgtatgtaaataaacatgcattccacacaccagcttttgataaaagtgcttttgttaatttaaaacaattaccatttttctattactctgacagtccatgtgagtctcatggaaaacaagtagtgtcagatatagattatgtaccactaaagtctgctacgtgtataacacgttgcaatttaggtggtgctgtctgtagacatcatgctaatgagtacagattgtatctcgatgcttataacatgatgatctcagctggctttagcttgtgggtttacaaacaatttgatacttataacctctggaacacttttacaagacttcagagtttagaaaatgtggcttttaatgttgtaaataagggacactttgatggacaacagggtgaagtaccagtttctatcattaataacactgtttacacaaaagttgatggtgttgatgtagaattgtttgaaaataaaacaacattacctgttaatgtagcatttgagctttgggctaagcgcaacattaaaccagtaccagaggtgaaaatactcaataatttgggtgtggacattgctgctaatactgtgatctgggactacaaaagagatgctccagcacatatatctactattggtgtttgttctatgactgacatagccaagaaaccaactgaaacgatttgtgcaccactcactgtcttttttgatggtagagttgatggtcaagtagacttatttagaaatgcccgtaatggtgttcttattacagaaggtagtgttaaaggtttacaaccatctgtaggtcccaaacaagctagtcttaatggagtcacattaattggagaagccgtaaaaacacagttcaattattataagaaagttgatggtgttgtccaacaattacctgaaacttactttactcagagtagaaatttacaagaatttaaacccaggagtcaaatggaaattgatttcttagaattagctatggatgaattcattgaacggtataaattagaaggctatgccttcgaacatatcgtttatggagattttagtcatagtcagttaggtggtttacatctactgattggactagctaaacgttttaaggaatcaccttttgaattagaagattttattcctatggacagtacagttaaaaactatttcataacagatgcgcaaacaggttcatctaagtgtgtgtgttctgttattgatttattacttgatgattttgttgaaataataaaatcccaagatttatctgtagtttctaaggttgtcaaagtgactattgactatacagaaatttcatttatgctttggtgtaaagatggccatgtagaaacattttacccaaaattacaatctagtcaagcgtggcaaccgggtgttgctatgcctaatctttacaaaatgcaaagaatgctattagaaaagtgtgaccttcaaaattatggtgatagtgcaacattacctaaaggcataatgatgaatgtcgcaaaatatactcaactgtgtcaatatttaaacacattaacattagctgtaccctataatatgagagttatacattttggtgctggttctgataaaggagttgcaccaggtacagctgttttaagacagtggttgcctacgggtacgctgcttgtcgattcagatcttaatgactttgtctctgatgcagattcaactttgattggtgattgtgcaactgtacatacagctaataaatgggatctcattattagtgatatgtacgaccctaagactaaaaatgttacaaaagaaaatgactctaaagagggttttttcacttacatttgtgggtttatacaacaaaagctagctcttggaggttccgtggctataaagataacagaacattcttggaatgctgatctttataagctcatgggacacttcgcatggtggacagcctttgttactaatgtgaatgcgtcatcatctgaagcatttttaattggatgtaattatcttggcaaaccacgcgaacaaatagatggttatgtcatgcatgcaaattacatattttggaggaatacaaatccaattcagttgtcttcctattctttatttgacatgagtaaatttccccttaaattaaggggtactgctgttatgtctttaaaagaaggtcaaatcaatgatatgattttatctcttcttagtaaaggtagacttataattagagaaaacaacagagttgttatttctagtgatgttcttgttaacaactaaacgaacaatgtttgtttttcttgttttattgccactagtctctagtcagtgtgttaatcttacaaccagaactcaattaccccctgcatacactaattctttcacacgtggtgtttattaccctgacaaagttttcagatcctcagttttacattcaactcaggacttgttcttacctttcttttccaatgttacttggttccatgctatacatgtctctgggaccaatggtactaagaggtttgataaccctgtcctaccatttaatgatggtgtttattttgcttccactgagaagtctaacataataagaggctggatttttggtactactttagattcgaagacccagtccctacttattgttaataacgctactaatgttgttattaaagtctgtgaatttcaattttgtaatgatccatttttgggtgtttattaccacaaaaacaacaaaagttggatggaaagtgagttcagagtttattctagtgcgaataattgcacttttgaatatgtctctcagccttttcttatggaccttgaaggaaaacagggtaatttcaaaaatcttagggaatttgtgtttaagaatattgatggttattttaaaatatattctaagcacacgcctattaatttagtgcgtgatctcccccagggtttttcggctttagaaccattggtagatttgccaataggtattaacatcactaggtttcaaactttacttgctttacatagaagttatttgactcctggtgattcttcttcaggttggacagctggtgctgcagcttattatgtgggttatcttcaacctaggacttttctattaaaatataatgaaaatggaaccattacagatgctgtagactgtgcacttgaccctctctcagaaacaaagtgtacgttgaaatccttcactgtagaaaaaggaatctatcaaacttctaactttagagtccaaccaacagaatctattgttagatttcctaatattacaaacttgtgcccttttggtgaagtttttaacgccaccagatttgcatctgtttatgcttggaacaggaagagaatcagcaactgtgttgctgattattctgtcctatataattccgcatcattttccacttttaagtgttatggagtgtctcctactaaattaaatgatctctgctttactaatgtctatgcagattcatttgtaattagaggtgatgaagtcagacaaatcgctccagggcaaactggaaagattgctgattataattataaattaccagatgattttacaggctgcgttatagcttggaattctaacaatcttgattctaaggttggtggtaattataattacctgtatagattgtttaggaagtctaatctcaaaccttttgagagagatatttcaactgaaatctatcaggccggtagcacaccttgtaatggtgttgaaggttttaattgttactttcctttacaatcatatggtttccaacccactaatggtgttggttaccaaccatacagagtagtagtactttcttttgaacttctacatgcaccagcaactgtttgtggacctaaaaagtctactaatttggttaaaaacaaatgtgtcaatttcaacttcaatggtttaacaggcacaggtgttcttactgagtctaacaaaaagtttctgcctttccaacaatttggcagagacattgctgacactactgatgctgtccgtgatccacagacacttgagattcttgacattacaccatgttcttttggtggtgtcagtgttataacaccaggaacaaatacttctaaccaggttgctgttctttatcaggatgttaactgcacagaagtccctgttgctattcatgcagatcaacttactcctacttggcgtgtttattctacaggttctaatgtttttcaaacacgtgcaggctgtttaataggggctgaacatgtcaacaactcatatgagtgtgacatacccattggtgcaggtatatgcgctagttatcagactcagactaattctcctcggcgggcacgtagtgtagctagtcaatccatcattgcctacactatgtcacttggtgcagaaaattcagttgcttactctaataactctattgccatacccacaaattttactattagtgttaccacagaaattctaccagtgtctatgaccaagacatcagtagattgtacaatgtacatttgtggtgattcaactgaatgcagcaatcttttgttgcaatatggcagtttttgtacacaattaaaccgtgctttaactggaatagctgttgaacaagacaaaaacacccaagaagtttttgcacaagtcaaacaaatttacaaaacaccaccaattaaagattttggtggttttaatttttcacaaatattaccagatccatcaaaaccaagcaagaggtcatttattgaagatctacttttcaacaaagtgacacttgcagatgctggcttcatcaaacaatatggtgattgccttggtgatattgctgctagagacctcatttgtgcacaaaagtttaacggccttactgttttgccacctttgctcacagatgaaatgattgctcaatacacttctgcactgttagcgggtacaatcacttctggttggacctttggtgcaggtgctgcattacaaataccatttgctatgcaaatggcttataggtttaatggtattggagttacacagaatgttctctatgagaaccaaaaattgattgccaaccaatttaatagtgctattggcaaaattcaagactcactttcttccacagcaagtgcacttggaaaacttcaagatgtggtcaaccaaaatgcacaagctttaaacacgcttgttaaacaacttagctccaattttggtgcaatttcaagtgttttaaatgatatcctttcacgtcttgacaaagttgaggctgaagtgcaaattgataggttgatcacaggcagacttcaaagtttgcagacatatgtgactcaacaattaattagagctgcagaaatcagagcttctgctaatcttgctgctactaaaatgtcagagtgtgtacttggacaatcaaaaagagttgatttttgtggaaagggctatcatcttatgtccttccctcagtcagcacctcatggtgtagtcttcttgcatgtgacttatgtccctgcacaagaaaagaacttcacaactgctcctgccatttgtcatgatggaaaagcacactttcctcgtgaaggtgtctttgtttcaaatggcacacactggtttgtaacacaaaggaatttttatgaaccacaaatcattactacagacaacacatttgtgtctggtaactgtgatgttgtaataggaattgtcaacaacacagtttatgatcctttgcaacctgaattagactcattcaaggaggagttagataaatattttaagaatcatacatcaccagatgttgatttaggtgacatctctggcattaatgcttcagttgtaaacattcaaaaagaaattgaccgcctcaatgaggttgccaagaatttaaatgaatctctcatcgatctccaagaacttggaaagtatgagcagtatataaaatggccatggtacatttggctaggttttatagctggcttgattgccatagtaatggtgacaattatgctttgctgtatgaccagttgctgtagttgtctcaagggctgttgttcttgtggatcctgctgcaaatttgatgaagacgactctgagccagtgctcaaaggagtcaaattacattacacataaacgaacttatggatttgtttatgagaatcttcacaattggaactgtaactttgaagcaaggtgaaatcaaggatgctactccttcagattttgttcgcgctactgcaacgataccgatacaagcctcactccctttcggatggcttattgttggcgttgcacttcttgctgtttttcagagcgcttccaaaatcataaccctcaaaaagagatggcaactagcactctccaagggtgttcactttgtttgcaacttgctgttgttgtttgtaacagtttactcacaccttttgctcgttgctgctggccttgaagccccttttctctatctttatgctttagtctacttcttgcagagtataaactttgtaagaataataatgaggctttggctttgctggaaatgccgttccaaaaacccattactttatgatgccaactattttctttgctggcatactaattgttacgactattgtataccttacaatagtgtaacttcttcaattgtcattacttcaggtgatggcacaacaagtcctatttctgaacatgactaccagattggtggttatactgaaaaatgggaatctggagtaaaagactgtgttgtattacacagttacttcacttcagactattaccagctgtactcaactcaattgagtacagacactggtgttgaacatgttaccttcttcatctacaataaaattgttgatgagcctgaagaacatgtccaaattcacacaatcgacggttcatccggagttgttaatccagtaatggaaccaatttatgatgaaccgacgacgactactagcgtgcctttgtaagcacaagctgatgagtacgaacttatgtactcattcgtttcggaagagacaggtacgttaatagttaatagcgtacttctttttcttgctttcgtggtattcttgctagttacactagccatccttactgcgcttcgattgtgtgcgtactgctgcaatattgttaacgtgagtcttgtaaaaccttctttttacgtttactctcgtgttaaaaatctgaattcttctagagttcctgatcttctggtctaaacgaactaaatattatattagtttttctgtttggaactttaattttagccatggcagattccaacggtactattaccgttgaagagcttaaaaagctccttgaacaatggaacctagtaataggtttcctattccttacatggatttgtcttctacaatttgcctatgccaacaggaataggtttttgtatataattaagttaattttcctctggctgttatggccagtaactttagcttgttttgtgcttgctgctgtttacagaataaattggatcaccggtggaattgctatcgcaatggcttgtcttgtaggcttgatgtggctcagctacttcattgcttctttcagactgtttgcgcgtacgcgatccatgtggtcattcaatccagaaactaacattcttctcaacgtgccactccatggcactattctgaccagaccgcttctagaaagtgaactcgtaatcggagctgtgatccttcgtggacatcttcgtattgctggacaccatctaggacgctgtgacatcaaggacctgcctaaagaaatcactgttgctacatcacgaacgctttcttattacaaattgggagcttcgcagcgtgtagcaggtgactcaggttttgctgcatacagtcgctacaggattggcaactataaattaaacacagaccattccagtagcagtgacaatattgctttgcttgtacagtaagtgacaacagatgtttcatctcgttgactttcaggttactatagcagagatattactaattattatgaggacttttaaagtttccatttggaatcttgattacatcataaacctcataattaaaaatttatctaagtcactaactgagaataaatattctcaattagatgaagagcaaccaatggagattgattaaacgaacatgaaaattattcttttcttggcactgataacactcgctacttgtgagctttatcactaccaagagtgtgttagaggtacaacagtacttttaaaagaaccttgctcttctggaacatacgagggcaattcaccatttcatcctctagctgataacaaatttgcactgacttgctttagcactcaatttgcttttgcttgtcctgacggcgtaaaacacgtctatcagttacgtgccagatcagtttcacctaaactgttcatcagacaagaggaagttcaagaactttactctccaatttttcttattgttgcggcaatagtgtttataacactttgcttcacactcaaaagaaagacagaatgattgaactttcattaattgacttctatttgtgctttttagcctttctgctattccttgttttaattatgcttattatcttttggttctcacttgaactgcaagatcataatgaaacttgtcacgcctaaacgaacatgaaatttcttgttttcttaggaatcatcacaactgtagctgcatttcaccaagaatgtagtttacagtcatgtactcaacatcaaccatatgtagttgatgacccgtgtcctattcacttctattctaaatggtatattagagtaggagctagaaaatcagcacctttaattgaattgtgcgtggatgaggctggttctaaatcacccattcagtacatcgatatcggtaattatacagtttcctgtttaccttttacaattaattgccaggaacctaaattgggtagtcttgtagtgcgttgttcgttctatgaagactttttagagtatcatgacgttcgtgttgttttagatttcatctaaacgaacaaactaaaatgtctgataatggaccccaaaatcagcgaaatgcaccccgcattacgtttggtggaccctcagattcaactggcagtaaccagaatggagaacgcagtggggcgcgatcaaaacaacgtcggccccaaggtttacccaataatactgcgtcttggttcaccgctctcactcaacatggcaaggaagaccttaaattccctcgaggacaaggcgttccaattaacaccaatagcagtccagatgaccaaattggctactaccgaagagctaccagacgaattcgtggtggtgacggtaaaatgaaagatctcagtccaagatggtatttctactacctaggaactgggccagaagctggacttccctatggtgctaacaaagacggcatcatatgggttgcaactgagggagccttgaatacaccaaaagatcacattggcacccgcaatcctgctaacaatgctgcaatcgtgctacaacttcctcaaggaacaacattgccaaaaggcttctacgcagaagggagcagaggcggcagtcaagcctcttctcgttcctcatcacgtagtcgcaacagttcaagaaattcaactccaggcagcagtaggggaacttctcctgctagaatggctggcaatggcggtgatgctgctcttgctttgctgctgcttgacagattgaaccagcttgagagcaaaatgtctggtaaaggccaacaacaacaaggccaaactgtcactaagaaatctgctgctgaggcttctaagaagcctcggcaaaaacgtactgccactaaagcatacaatgtaacacaagctttcggcagacgtggtccagaacaaacccaaggaaattttggggaccaggaactaatcagacaaggaactgattacaaacattggccgcaaattgcacaatttgcccccagcgcttcagcgttcttcggaatgtcgcgcattggcatggaagtcacaccttcgggaacgtggttgacctacacaggtgccatcaaattggatgacaaagatccaaatttcaaagatcaagtcattttgctgaataagcatattgacgcatacaaaacattcccaccaacagagcctaaaaaggacaaaaagaagaaggctgatgaaactcaagccttaccgcagagacagaagaaacagcaaactgtgactcttcttcctgctgcagatttggatgatttctccaaacaattgcaacaatccatgagcagtgctgactcaactcaggcctaaactcatgcagaccacacaaggcagatgggctatataaacgttttcgcttttccgtttacgatatatagtctactcttgtgcagaatgaattctcgtaactacatagcacaagtagatgtagttaactttaatctcacatagcaatctttaatcagtgtgtaacattagggaggacttgaaagagccaccacattttcaccgaggccacgcggagtacgatcgagtgtacagtgaacaatgctagggagagctgcctatatggaagagccctaatgtgtaaaattaattttagtagtgctatccccatgtgattttaatagcttcttaggagaatgacaaaaaaaaaaaaaaaaaaaaaaaaaaaaaaaaaaaaaaaaaaaaaaaaaaaaaaaaaaagggtcggcatggcatctccacctcctcgcggtccgacctgggcatccgaaggaggacgcacgtccactcggatggctaagggagcagcacactggcggccgttactagggccgcgcccttcccaacagttgcgcagcctgaatggcgaatggagatccaatttttaagtgtataatgtgttaaactactgattctaattgtttgtgtattttagattcacagtcccaaggctcatttcaggcccctcagtcctcacagtctgttcatgatcataatcagccataccacatttgtagaggttttacttgctttaaaaaacctcccacacctccccctgaacctgaaacataaaatgaatgcaattgttgttgttaacttgtttattgcagcttataatggttacaaataaagcaatagcatcacaaatttcacaaataaagcatttttttcactgcattctagttgtggtttgtccaaactcatcaatgtatcttaaagcttgagtattctatagtctcacctaaatagcttggcgtaatcatggtcatagctgtttcctgtgtgaaattgttatccgctcacaattccacacaacatacgagccggaagcataaagtgtaaagcctggggtgcctaatgagtgagctaactcacattaattgcgttgcgctcactgcccgctttccagtcgggaaacctgtcgtgccagctgcattaatgaatcggccaacgcgaaccccttgcggccgcccgggccgtcgaccaattctcatgtttgacagcttatcatcgaatttctgccattcatccgcttattatcacttattcaggcgtagcaaccaggcgtttaagggcaccaataactgccttaaaaaaattacgccccgccctgccactcatcgcagtactgttgtaattcattaagcattctgccgacatggaagccatcacaaacggcatgatgaacctgaatcgccagcggcatcagcaccttgtcgccttgcgtataatatttgcccatggtgaaaacgggggcgaagaagttgtccatattggccacgtttaaatcaaaactggtgaaactcacccagggattggctgagacgaaaaacatattctcaataaaccctttagggaaataggccaggttttcaccgtaacacgccacatcttgcgaatatatgtgtagaaactgccggaaatcgtcgtggtattcactccagagcgatgaaaacgtttcagtttgctcatggaaaacggtgtaacaagggtgaacactatcccatatcaccagctcaccgtctttcattgccatacgaaattccggatgagcattcatcaggcgggcaagaatgtgaataaaggccggataaaacttgtgcttatttttctttacggtctttaaaaaggccgtaatatccagctgaacggtctggttataggtacattgagcaactgactgaaatgcctcaaaatgttctttacgatgccattgggatatatcaacggtggtatatccagtgatttttttctccattttagcttccttagctcctgaaaatctcgataactcaaaaaatacgcccggtagtgatcttatttcattatggtgaaagttggaacctcttacgtgccgatcaacgtctcattttcgccaaaagttggcccagggcttcccggtatcaacagggacaccaggatttatttattctgcgaagtgatcttccgtcacaggtatttattcgcgataagctcatggagcggcgtaaccgtcgcacaggaaggacagagaaagcgcggatctgggaagtgacggacagaacggtcaggacctggattggggaggcggttgccgccgctgctgctgacggtgtgacgttctctgttccggtcacaccacatacgttccgccattcctatgcgatgcacatgctgtatgccggtataccgctgaaagttctgcaaagcctgatgggacataagtccatcagttcaacggaagtctacacgaaggtttttgcgctggatgtggctgcccggcaccgggtgcagtttgcgatgccggagtctgatgcggttgcgatgctgaaacaattatcctgagaataaatgccttggcctttatatggaaatgtggaactgagtggatatgctgtttttgtctgttaaacagagaagctggctgttatccactgagaagcgaacgaaacagtcgggaaaatctcccattatcgtagagatccgcattattaatctcaggagcctgtgtagcgtttataggaagtagtgttctgtcatgatgcctgcaagcggtaacgaaaacgatttgaatatgccttcaggaacaatagaaatcttcgtgcggtgttacgttgaagtggagcggattatgtcagcaatggacagaacaacctaatgaacacagaaccatgatgtggtctgtccttttacagccagtagtgctcgccgcagtcgagcgacagggcgaagccctcggctggttgccctcgccgctgggctggcggccgtctatggccctgcaaacgcgccagaaacgccgtcgaagccgtgtgcgagacaccgcggccggccgccggcgttgtggatacctcgcggaaaacttggccctcactgacagatgaggggcggacgttgacacttgaggggccgactcacccggcgcggcgttgacagatgaggggcaggctcgatttcggccggcgacgtggagctggccagcctcgcaaatcggcgaaaacgcctgattttacgcgagtttcccacagatgatgtggacaagcctggggataagtgccctgcggtattgacacttgaggggcgcgactactgacagatgaggggcgcgatccttgacacttgaggggcagagtgctgacagatgaggggcgcacctattgacatttgaggggctgtccacaggcagaaaatccagcatttgcaagggtttccgcccgtttttcggccaccgctaacctgtcttttaacctgcttttaaaccaatatttataaaccttgtttttaaccagggctgcgccctgtgcgcgtgaccgcgcacgccgaaggggggtgcccccccttctcgaaccctcccggtcgagtgagcgaggaagcaccagggaacagcacttatatattctgcttacacacgatgcctgaaaaaacttcccttggggttatccacttatccacggggatatttttataattattttttttatagtttttagatcttcttttttagagcgccttgtaggcctttatccatgctggttctagagaaggtgttgtgacaaattgccctttcagtgtgacaaatcaccctcaaatgacagtcctgtctgtgacaaattgcccttaaccctgtgacaaattgccctcagaagaagctgttttttcacaaagttatccctgcttattgactcttttttatttagtgtgacaatctaaaaacttgtcacacttcacatggatctgtcatggcggaaacagcggttatcaatcacaagaaacgtaaaaatagcccgcgaatcgtccagtcaaacgacctcactgaggcggcatatagtctctcccgggatcaaaaacgtatgctgtatctgttcgttgaccagatcagaaaatctgatggcaccctacaggaacatgacggtatctgcgagatccatgttgctaaatatgctgaaatattcggattgacctctgcggaagccagtaaggatatacggcaggcattgaagagtttcgcggggaaggaagtggttttttatcgccctgaagaggatgccggcgatgaaaaaggctatgaatcttttccttggtttatcaaacgtgcgcacagtccatccagagggctttacagtgtacatatcaacccatatctcattcccttctttatcgggttacagaaccggtttacgcagtttcggcttagtgaaacaaaagaaatcaccaatccgtatgccatgcgtttatacgaatccctgtgtcagtatcgtaagccggatggctcaggcatcgtctctctgaaaatcgactggatcatagagcgttaccagctgcctcaaagttaccagcgtatgcctgacttccgccgccgcttcctgcaggtctgtgttaatgagatcaacagcagaactccaatgcgcctctcatacattgagaaaaagaaaggccgccagacgactcatatcgtattttccttccgcgatatcacttccatgacgacaggatagtctgagggttatctgtcacagatttgagggtggttcgtcacatttgttctgacctactgagggtaatttgtcacagttttgctgtttccttcagcctgcatggattttctcatactttttgaactgtaatttttaaggaagccaaatttgagggcagtttgtcacagttgatttccttctctttcccttcgtcatgtgacctgatatcgggggttagttcgtcatcattgatgagggttgattatcacagtttattactctgaattggctatccgcgtgtgtacctctacctggagtttttcccacggtggatatttcttcttgcgctgagcgtaagagctatctgacagaacagttcttctttgcttcctcgccagttcgctcgctatgctcggttacacggctgcggcg

SEQ ID NO: 21 - DNA, 35283 bp, Artificial Sequence
  Clone pCCI-4K-SARS-CoV-2-WDWDW. Based on SARS-CoV-2.
gatgtgctgcaaggcgattaagttgggtaacgccagggttttcccagtcacgacgttgtaaaacgacggccagtgaattgtaatacgactcactatagggcgaattctagttattaatagtaatcaattacggggtcattagttcatagcccatatatggagttccgcgttacataacttacggtaaatggcccgcctggctgaccgcccaacgacccccgcccattgacgtcaataatgacgtatgttcccatagtaacgccaatagggactttccattgacgtcaatgggtggagtatttacggtaaactgcccacttggcagtacatcaagtgtatcatatgccaagtacgccccctattgacgtcaatgacggtaaatggcccgcctggcattatgcccagtacatgaccttatgggactttcctacttggcagtacatctacgtattagtcatcgctattaccatggtgatgcggttttggcagtacatcaatgggcgtggatagcggtttgactcacggggatttccaagtctccaccccattgacgtcaatgggagtttgttttggcaccaaaatcaacgggactttccaaaatgtcgtaacaactccgccccattgacgcaaatgggcggtaggcgtgtacggtgggaggtctatataagcagagctggtttagtgaaccgtattaaaggtttataccttcccaggtaacaaaccaaccaactttcgatctcttgtagatctgttctctaaacgaactttaaaatctgtgtggctgtcactcggctgcatgcttagtgcactcacgcagtataattaataactaattactgtcgttgacaggacacgagtaactcgtctatcttctgcaggctgcttacggtttcgtccgtgttgcagccgatcatcagcacatctaggtttcgtccgggtgtgaccgaaaggtaagatggagagccttgtccctggtttcaacgagaaaacacacgtccaactcagtttgcctgttttacaggttcgcgacgtgctcgtacgtggctttggagactccgtggaggaggtcttatcagaggcacgtcaacatcttaaagatggcacttgtggcttagtagaagttgaaaaaggcgttttgcctcaacttgaacagccctatgtgttcatcaaacgttcggatgctcgaactgcacctcatggtcatgttatggttgagctggtagcagaactcgaaggcattcagtacggtcgtagtggtgagacacttggtgtccttgtccctcatgtgggcgaaataccagtggcttaccgcaaggttcttcttcgtaagaacggtaataaaggagctggtggccatagttacggcgccgatctaaagtcatttgacttaggcgacgagcttggcactgatccttatgaagattttcaagaaaactggaacactaaacatagcagtggtgttacccgtgaactcatgcgtgagcttaacggaggggcatacactcgctatgtcgataacaacttctgtggccctgatggctaccctcttgagtgcattaaagaccttctagcacgtgctggtaaagcttcatgcactttgtccgaacaactggactttattgacactaagaggggtgtatactgctgccgtgaacatgagcatgaaattgcttggtacacggaacgttctgaaaagagctatgaattgcagacaccttttgaaattaaattggcaaagaaatttgacaccttcaatggggaatgtccaaattttgtatttcccttaaattccataatcaagactattcaaccaagggttgaaaagaaaaagcttgatggctttatgggtagaattcgatctgtctatccagttgcgtcaccaaatgaatgcaaccaaatgtgcctttcaactctcatgaagtgtgatcattgtggtgaaacttcatggcagacgggcgattttgttaaagccacttgcgaattttgtggcactgagaatttgactaaagaaggtgccactacttgtggttacttaccccaaaatgctgttgttaaaatttattgtccagcatgtcacaattcagaagtaggacctgagcatagtcttgccgaataccataatgaatctggcttgaaaaccattcttcgtaagggtggtcgcactattgcctttggaggctgtgtgttctcttatgttggttgccataacaagtgtgcctattgggtcccacgtgctagcgctaacataggttgtaaccatacaggtgttgttggagaaggttccgaaggtcttaatgacaaccttcttgaaatactccaaaaagagaaagtcaacatcaatattgttggtgactttaaacttaatgaagagatcgccattattttggcatctttttctgcttccacaagtgcttttgtggaaactgtgaaaggtttggattataaagcattcaaacaaattgttgaatcctgtggtaattttaaagttacaaaaggaaaagctaaaaaaggtgcctggaatattggtgaacagaaatcaatactgagtcctctttatgcatttgcatcagaggctgctcgtgttgtacgatcaattttctcccgcactcttgaaactgctcaaaattctgtgcgtgttttacagaaggccgctataacaatactagatggaatttcacagtattcactgagactcattgatgctatgatgttcacatctgatttggctactaacaatctagttgtaatggcctacattacaggtggtgttgttcagttgacttcgcagtggctaactaacatctttggcactgtttatgaaaaactcaaacccgtccttgattggcttgaagagaagtttaaggaaggtgtagagtttcttagagacggttgggaaattgttaaatttatctcaacctgtgcttgtgaaattgtcggtggacaaattgtcacctgtgcaaaggaaattaaggagagtgttcagacattctttaagcttgtaaataaatttttggctttgtgtgctgactctatcattattggtggagctaaacttaaagccttgaatttaggtgaaacatttgtcacgcactcaaagggattgtacagaaagtgtgttaaatccagagaagaaactggcctactcatgcctctaaaagccccaaaagaaattatcttcttagagggagaaacacttcccacagaagtgttaacagaggaagttgtcttgaaaactggtgatttacaaccattagaacaacctactagtgaagctgttgaagctccattggttggtacaccagtttgtattaacgggcttatgttgctcgaaatcaaagacacagaaaagtactgtgcccttgcacctaatatgatggtaacaaacaataccttcacactcaaaggcggtgcaccaacaaaggttacttttggtgatgacactgtgatagaagtgcaaggttacaagagtgtgaatatcacttttgaacttgatgaaaggattgataaagtacttaatgagaagtgctctgcctatacagttgaactcggtacagaagtaaatgagttcgcctgtgttgtggcagatgctgtcataaaaactttgcaaccagtatctgaattacttacaccactgggcattgatttagatgagtggagtatggctacatactacttatttgatgagtctggtgagtttaaattggcttcacatatgtattgttctttctaccctccagatgaggatgaagaagaaggtgattgtgaagaagaagagtttgagccatcaactcaatatgagtatggtactgaagatgattaccaaggtaaacctttggaatttggtgccacttctgctgctcttcaacctgaagaagagcaagaagaagattggttagatgatgatagtcaacaaactgttggtcaacaagacggcagtgaggacaatcagacaactactattcaaacaattgttgaggttcaacctcaattagagatggaacttacaccagttgttcagactattgaagtgaatagttttagtggttatttaaaacttactgacaatgtatacattaaaaatgcagacattgtggaagaagctaaaaaggtaaaaccaacagtggttgttaatgcagccaatgtttaccttaaacatggaggaggtgttgcaggagccttaaataaggctactaacaatgccatgcaagttgaatctgatgattacatagctactaatggaccacttaaagtgggtggtagttgtgttttaagcggacacaatcttgctaaacactgtcttcatgttgtcggcccaaatgttaacaaaggtgaagacattcaacttcttaagagtgcttatgaaaattttaatcagcacgaagttctacttgcaccattattatcagctggtatttttggtgctgaccctatacattctttaagagtttgtgtagatactgttcgcacaaatgtctacttagctgtctttgataaaaatctctatgacaaacttgtttcaagctttttggaaatgaagagtgaaaagcaagttgaacaaaagatcgctgagattcctaaagaggaagttaagccatttataactgaaagtaaaccttcagttgaacagagaaaacaagatgataagaaaatcaaagcttgtgttgaagaagttacaacaactctggaagaaactaagttcctcacagaaaacttgttactttatattgacattaatggcaatcttcatccagattctgccactcttgttagtgacattgacatcactttcttaaagaaagatgctccatatatagtgggtgatgttgttcaagagggtgttttaactgctgtggttatacctactaaaaaggctggtggcactactgaaatgctagcgaaagctttgagaaaagtgccaacagacaattatataaccacttacccgggtcaaggtttaaatggttatacggtagaagaagcgaaaacggtactaaaaaaatgtaaatcggcgttttatatactaccgtcgataatatcgaatgaaaaacaagaaatactaggtacggtatcgtggaatttacgtgaaatgctagcgcatgcggaagaaacacgtaaattaatgccggtatgtgtagaaacgaaagcgatagtatcgacgatacaacgtaaatataaaggtataaaaatacaagaaggtgtagtagattatggtgcgcgtttttatttttatacgtcgaaaacgacggtagcgtcgctaataaatacgctaaatgatctaaatgaaacgctagtaacgatgccgctaggttatgtaacgcatggtttaaatttagaagaagcggcgcgttatatgcgttcgctaaaagtaccggcgacggtatcggtatcgtcgccggatgcggtaacggcgtataatggttatctaacgtcgtcgtcgaaaacgccggaagaacattttatagaaacgatatcgctagcgggttcgtataaagattggtcgtattcgggtcaatcgacgcaactaggtatagaatttctaaaacgtggtgataaatcggtatattatacgtcgaatccgacgacgtttcatctagatggtgaagtaataacgtttgataatctaaaaacgctactatcgttacgtgaagtacgtacgataaaagtatttacgacggtagataatataaatctacatacgcaagtagtagatatgtcgatgacatatggacaacaatttggtccgacgtatttagatggtgcggatgttacgaaaataaaaccgcataattcgcatgaaggtaaaacgttttatgtattaccgaatgatgatacgctacgtgtagaagcgtttgaatattatcatacgactgatccgtcgtttctaggtcgttatatgtcggcgttaaatcatacgaaaaaatggaaatatccgcaagtaaatggtttaacgtcgataaaatgggcggataataattgttatctagcgacggcgttattaacgctacaacaaatagaattaaaatttaatccgccggcgctacaagatgcgtattatcgtgcgcgtgcgggtgaagcggcgaatttttgtgcgctaatattagcgtattgtaataaaacggtaggtgaattaggtgatgtacgtgaaacgatgtcgtatttatttcaacatgcgaatttagattcgtgtaaacgtgtattaaatgtagtatgtaaaacgtgtggtcaacaacaaacgacgctaaaaggtgtagaagcggtaatgtatatgggtacgctatcgtatgaacaatttaaaaaaggtgtacaaataccgtgtacgtgtggtaaacaagcgacgaaatatctagtacaacaagaatcgccgtttgtaatgatgtcggcgccgccggcgcaatatgaactaaaacatggtacgtttacgtgtgcgtcggaatatacgggtaattatcaatgtggtcattataaacatataacgtcgaaagaaacgttatattgtatagatggtgcgttacttacgaaatcgtcggaatataaaggtccgataacggatgtattttataaagaaaattcgtatacgacgacgataaaaccggtaacgtataaattagatggtgtagtatgtacggaaatagatccgaaattagataattattataaaaaagataattcgtattttacggaacaaccgatagatctagtaccgaatcaaccatatccgaatgcgtcgtttgataattttaaatttgtatgtgataatataaaatttgcggatgatttaaatcaattaacgggttataaaaaaccggcgtcgcgtgaactaaaagtaacgttttttccggatttaaatggtgatgtagtagcgatagattataaacattatacgccgtcgtttaaaaaaggtgcgaaattattacataaaccgatagtatggcatgtaaataatgcgacgaataaagcgacgtataaaccgaatacgtggtgtatacggtgtctatggagcacgaaaccggtagaaacgtcgaattcgtttgatgtactaaaatcggaagatgcgcaaggtatggataatctagcgtgtgaagatctaaaaccggtatcggaagaagtagtagaaaatccgacgatacaaaaagatgtactggaatgtaatgtaaaaacgacggaagtagtaggtgatataatactaaaaccggctaataattcgttaaaaataacggaagaagtaggtcatacggatctaatggcggcgtatgtagataattcgtcgctaacgataaaaaaaccgaatgaattatcgcgtgtattaggtttaaaaacgctagcgacgcatggtttagctgctgtaaattcggtaccgtgggatacgatagcgaattatgcgaaaccgtttctaaataaagtagtatcgacgacgacgaatatagtaacgcgatgtttaaatcgtgtatgtacgaattatatgccgtatttttttacgttattactacaattatgtacgtttacgcgatcgacgaattcgcgtataaaagcgtcgatgccgacgacgatagcgaaaaatacggtaaaatcggtaggtaaattttgtctagaagcgtcgtttaattatttaaaatcgccgaatttttctaaactaataaatataataatatggtttttactattatcggtatgcctaggttctttaatctactcaaccgctgctttaggtgttttaatgtctaatttaggcatgccttcttactgtactggttacagagaaggctatttgaactctactaatgtcactattgcaacctactgtactggttctataccttgtagtgtttgtcttagtggtttagattctttagacacctatccttctttagaaactatacaaattaccatttcatcttttaaatgggatttaactgcttttggcttagttgcagagtggtttttggcatatattcttttcactaggtttttctatgtacttggattggctgcaatcatgcaattgtttttcagctattttgcagtacattttattagtaattcttggcttatgtggttaataattaatcttgtacaaatggccccgatttcagctatggttagaatgtacatcttctttgcatcattttattatgtatggaaaagttatgtgcatgttgtagacggttgtaattcatcaacttgtatgatgtgttacaaacgtaatagagcaacaagagtcgaatgtacaactattgttaatggtgttagaaggtccttttatgtctatgctaatggaggtaaaggcttttgcaaactacacaattggaattgtgttaattgtgatacattctgtgctggtagtacatttattagtgatgaagttgcgagagacttgtcactacagtttaaaagaccaataaatcctactgaccagtcttcttacatcgttgatagtgttacagtgaagaatggttccatccatctttactttgataaagctggtcaaaagacttatgaaagacattctctctctcattttgttaacttagacaacctgagagctaataacactaaaggttcattgcctattaatgttatagtttttgatggtaaatcaaaatgtgaagaatcatctgcaaaatcagcgtctgtttactacagtcagcttatgtgtcaacctatactgttactagatcaggcattagtgtctgatgttggtgatagtgcggaagttgcagttaaaatgtttgatgcttacgttaatacgttttcatcaacttttaacgtaccaatggaaaaactcaaaacactagttgcaactgcagaagctgaacttgcaaagaatgtgtccttagacaatgtcttatctacttttatttcagcagctcggcaagggtttgttgattcagatgtagaaactaaagatgttgttgaatgtcttaaattgtcacatcaatctgacatagaagttactggcgatagttgtaataactatatgctcacctataacaaagttgaaaacatgacaccccgtgaccttggtgcttgtattgactgtagtgcgcgtcatattaatgcgcaggtagcaaaaagtcacaacattgctttgatatggaacgttaaagatttcatgtcattgtctgaacaactacgaaaacaaatacgtagtgctgctaaaaagaataacttaccttttaagttgacatgtgcaactactagacaagttgttaatgttgtaacaacaaagatagcacttaagggtggtaaaattgttaataattggttgaagcagttaattaaagtaacgctagtatttctatttgtagcggcgatattttatttaataacgccggtacatgtaatgtcgaaacatacggatttttcgtcggaaataataggttataaagcgatagatggtggtgtaactcgtgatatagcgtcgacggatacgtgttttgcgaataaacatgcggattttgatacgtggttttcgcaacgtggtggttcgtatacgaatgataaagcgtgtccgttaatagcggcggtaataacacgtgaagtaggttttgtagtaccgggtttaccgggtacgatattacgtacgacgaatggtgattttttacattttttaccgcgtgtattttcggcggtaggtaatatatgttatacgccgtcgaaactaatagaatatacggattttgcgacgtcggcgtgtgtattagcggcggaatgtacgatatttaaagatgcgtcgggtaaaccggtaccgtattgttatgatacgaatgtactagaaggttcggtagcgtatgaatcgttacgcccggatacacgttatgtactaatggatggttcgataatacaatttccgaatacgtatctagaaggttcggtacgtgtagtaacgacgtttgattcggaatattgtcgtcatggtacgtgtgaacgttcggaagcgggtgtatgtgtatcgacgtcggggcgttgggtactaaataatgattattatcgttcgttaccgggtgtattctgtggtgtagatgcggtaaatttactaacgaatatgtttacgccgctgatacaaccgataggtgcgttagatatatcggcgtcgatagtagcgggtggtatagtagcgatagtagtaacgtgtctagcgtattattttatgcgttttcgtcgtgcgtttggtgaatattcgcatgtagtagcgtttaatacgttactatttctaatgtcttttacagtactatgtttaacgccggtatattcttttttaccgggtgtatattcggtaatatatttatatttaacgttttatctaacgaatgatgtatcgtttttagcgcatatacaatggatggtaatgtttacgccgttagtaccgttttggataacaatagcgtatataatatgtatatcgacgaaacatttttattggtttttttcgaattatctgaaacgtcgtgtagtatttaatggtgtatctttttcgacgtttgaagaagcggcgctatgtacatttttattaaataaagaaatgtatctaaaattacgttcggatgtactattaccgctaacgcaatataatcgttatttagcgctatataataaatataaatatttttcgggtgcgatggatacgacgtcgtatcgtgaagcggcgtgttgtcatctagcgaaagcgctaaatgatttttcgaattcgggttcggatgtactatatcaaccgccgcaaacgtcgataacgtcggcggtattacaatcgggttttcgtaaaatggcgtttccgtcgggtaaagtagaaggttgtatggtacaagtaacgtgtggtacgacgacgctaaatggtctatggctagatgatgtagtatattgtccgcgtcatgtaatatgtacgtcggaagatatgctaaatccgaattatgaagatttactaatacgtaaatcgaatcataattttttagtacaagcgggtaatgtacaactacgtgtaataggtcattcgatgcaaaattgtgtactaaaactaaaagtagatacggcgaatccgaaaacaccgaaatataaatttgtacgtatacaaccgggtcaaacgttttcggtattagcgtgttataatggttctccgtcgggtgtatatcaatgtgcgatgcgtccgaattttacgattaaaggttcgtttctaaatggttcgtgtggttcggtaggttttaatatagattatgattgtgtatcgttttgttatatgcatcatatggaattaccgacgggtgtacatgcgggtacggatttagaaggtaatttttatggtccgtttgtagatcgtcaaacagcgcaagcggcgggtacggatacgacgattacggtaaatgtattagcgtggttatatgcggcggtaataaatggtgatcgttggtttctaaatcgttttacgacgacgctaaatgattttaatctagtagcgatgaaatataattatgaaccgctgacacaagatcatgtagatatactaggtccgctatcggcgcaaacgggtatagcggtattagatatgtgtgcgtcgttaaaagaattactacaaaatggtatgaatggtcgtacgatattaggttcggcgttattagaagatgaatttacgccgtttgatgtagtacgtcaatgttcgggtgtaacgtttcaatcggcggtaaaacgtacgataaaaggtacgcatcattggttattactaacgatattaacgtcgctattagtattagtacaatcgacgcaatggtcgttatttttttttttatatgaaaatgcgtttttaccgtttgcgatgggtataatagcgatgtcggcgtttgcgatgatgtttgtaaaacataagcatgcatttctctgtttgtttttgttaccttctcttgccactgtagcttattttaatatggtctatatgcctgctagttgggtgatgcgtattatgacatggttggatatggttgatactagtttgtctggttttaagctaaaagactgtgttatgtatgcatcagctgtagtgttactaatccttatgacagcaagaactgtgtatgatgatggtgctaggagagtgtggacacttatgaatgtcttgacactcgtttataaagtttattatggtaatgctttagatcaagccatttccatgtgggctcttataatctctgttacttctaactactcaggtgtagttacaactgtcatgtttttggccagaggtattgtttttatgtgtgttgagtattgccctattttcttcataactggtaatacacttcagtgtataatgctagtttattgtttcttaggctatttttgtacttgttactttggcctcttttgtttactcaaccgctactttagactgactcttggtgtttatgattacttagtttctacacaggagtttagatatatgaattcacagggactactcccacccaagaatagcatagatgccttcaaactcaacattaaattgttgggtgttggtggcaaaccttgtatcaaagtagccactgtacagtctaaaatgtcagatgtaaagtgcacatcagtagtcttactctcagttttgcaacaactcagagtagaatcatcatctaaattgtgggctcaatgtgtccagttacacaatgacattctcttagctaaagatactactgaagcctttgaaaaaatggtttcactactttctgttttgctttccatgcagggtgctgtagacataaacaagctttgtgaagaaatgctggacaacagggcaaccttacaagctatagcctcagagtttagttcccttccatcatatgcagcttttgctactgctcaagaagcttatgagcaggctgttgctaatggtgattctgaagttgttcttaaaaagttgaagaagtctttgaatgtggctaaatctgaatttgaccgtgatgcagccatgcaacgtaagttggaaaagatggctgatcaagctatgacccaaatgtataaacaggctagatctgaggacaagagggcaaaagttactagtgctatgcagacaatgcttttcactatgcttagaaagttggataatgatgcactcaacaacattatcaacaatgcaagagatggttgtgttcccttgaacataatacctcttacaacagcagccaaactaatggttgtcataccagactataacacatataaaaatacgtgtgatggtacaacatttacttatgcatcagcattgtgggaaatccaacaggttgtagatgcagatagtaaaattgttcaacttagtgaaattagtatggacaattcacctaatttagcatggcctcttattgtaacagctttaagggccaattctgctgtcaaattacagaataatgagcttagtcctgttgcactacgacagatgtcttgtgctgccggtactacacaaactgcttgcactgatgacaatgcgttagcttactacaacacaacaaagggaggtaggtttgtacttgcactgttatccgatttacaggatttgaaatgggctagattccctaagagtgatggaactggtactatctatacagaactggaaccaccttgtaggtttgttacagacacacctaaaggtcctaaagtgaagtatttatactttattaaaggattaaacaacctaaatagaggtatggtacttggtagtttagctgccacagtacgtctacaagctggtaatgcaacagaagtgcctgccaattcaactgtattatctttctgtgcttttgctgtagatgctgctaaagcttacaaagattatctagctagtgggggacaaccaatcactaattgtgttaagatgttgtgtacacacactggtactggtcaggcaataacagttacaccggaagccaatatggatcaagaatcctttggtggtgcatcgtgttgtctgtactgccgttgccacatagatcatccaaatcctaaaggattttgtgacttaaaaggtaagtatgtacaaatacctacaacttgtgctaatgaccctgtgggttttacacttaaaaacacagtctgtaccgtctgcggtatgtggaaaggttatggctgtagttgtgatcaactccgcgaacccatgcttcagtcagctgatgcacaatcgtttttaaacgggtttgcggtgtaagtgcagcccgtcttacaccgtgcggcacaggcactagtactgatgtcgtatacagggcttttgacatctacaatgataaagtagctggttttgctaaattcctaaaaactaattgttgtcgcttccaagaaaaggacgaagatgacaatttaattgattcttactttgtagttaagagacacactttctctaactaccaacatgaagaaacaatttataatttacttaaggattgtccagctgttgctaaacatgacttctttaagtttagaatagacggtgacatggtaccacatatatcacgtcaacgtcttactaaatacacaatggcagacctcgtctatgctttaaggcattttgatgaaggtaattgtgacacattaaaagaaatacttgtcacatacaattgttgtgatgatgattatttcaataaaaaggactggtatgattttgtagaaaacccagatatattacgcgtatacgccaacttaggtgaacgtgtacgccaagctttgttaaaaacagtacaattctgtgatgccatgcgaaatgctggtattgttggtgtactgacattagataatcaagatctcaatggtaactggtatgatttcggtgatttcatacaaaccacgccaggtagtggagttcctgttgtagattcttattattcattgttaatgcctatattaaccttgaccagggctttaactgcagagtcacatgttgacactgacttaacaaagccttacattaagtgggatttgttaaaatatgacttcacggaagagaggttaaaactctttgaccgttattttaaatattgggatcagacataccacccaaattgtgttaactgtttggatgacagatgcattctgcattgtgcaaactttaatgttttattctctacagtgttcccacctacaagttttggaccactagtgagaaaaatatttgttgatggtgttccatttgtagtttcaactggataccacttcagagagctaggtgttgtacataatcaggatgtaaacttacatagctctagacttagttttaaggaattacttgtgtatgctgctgaccctgctatgcacgctgcttctggtaatctattactagataaacgcactacgtgcttttcagtagctgcacttactaacaatgttgcttttcaaactgtcaaacccggtaattttaacaaagacttctatgactttgctgtgtctaagggtttctttaaggaaggaagttctgttgaattaaaacacttcttctttgctcaggatggtaatgctgctatcagcgattatgactactatcgttataatctaccaacaatgtgtgatatcagacaactactatttgtagttgaagttgttgataagtactttgattgttacgatggtggctgtattaatgctaaccaagtcatcgtcaacaacctagacaaatcagctggttttccatttaataaatggggtaaggctagactttattatgattcaatgagttatgaggatcaagatgcacttttcgcatatacaaaacgtaatgtcatccctactataactcaaatgaatcttaagtatgccattagtgcaaagaatagagctcgcaccgtagctggtgtctctatctgtagtactatgaccaatagacagtttcatcaaaaattattgaaatcaatagccgccactagaggagctactgtagtaattggaacaagcaaattctatggtggttggcacaacatgttaaaaactgtttatagtgatgtagaaaaccctcaccttatgggttgggattatcctaaatgtgatagagccatgcctaacatgcttagaattatggcctcacttgttcttgctcgcaaacatacaacgtgttgtagcttgtcacaccgtttctatagattagctaatgagtgtgctcaagtattgagtgaaatggtcatgtgtggcggttcactatatgttaaaccaggtggaacctcatcaggagatgccacaactgcttatgctaatagtgtttttaacatttgtcaagctgtcacggccaatgttaatgcacttttatctactgatggtaacaaaattgccgataagtatgtccgcaatttacaacacagactttatgagtgtctctatagaaatagagatgttgacacagactttgtgaatgagttttacgcatatttgcgtaaacatttctcaatgatgatactctctgacgatgctgttgtgtgtttcaatagcacttatgcatctcaaggtctagtggctagcataaagaactttaagtcagttctttattatcaaaacaatgtttttatgtctgaagcaaaatgttggactgagactgaccttactaaaggacctcatgaattttgctctcaacatacaatgctagttaaacagggtgatgattatgtgtaccttccttacccagatccatcaagaatcctaggggccggctgttttgtagatgatatcgtaaaaacagatggtacacttatgattgaacggttcgtgtctttagctatagatgcttacccacttactaaacatcctaatcaggagtatgctgatgtctttcatttgtacttacaatacataagaaagctacatgatgagttaacaggacacatgttagacatgtattctgttatgcttactaatgataacacttcaaggtattgggaacctgagttttatgaggctatgtacacaccgcatacagtcttacaggctgttggggcttgtgttctttgcaattcacagacttcattaagatgtggtgcttgcatacgtagaccattcttatgttgtaaatgctgttacgaccatgtcatatcaacatcacataaattagtcttgtctgttaatccgtatgtttgcaatgctccaggttgtgatgtcacagatgtgactcaactttacttaggaggtatgagctattattgtaaatcacataaaccacccattagttttccattgtgtgctaatggacaagtttttggtttatataaaaatacatgtgttggtagcgataatgttactgactttaatgcaattgcaacatgtgactggacaaatgctggtgattacattttagctaacacctgtactgaaagactcaagctttttgcagcagaaacgctcaaagctactgaggagacatttaaactgtcttatggtattgctactgtacgtgaagtgctgtctgacagagaattacatctttcatgggaagttggtaaacctagaccaccacttaaccgaaattatgtctttactggttatcgtgtaactaaaaacagtaaagtacaaataggagagtacacctttgaaaaaggtgactatggtgatgctgttgtttaccgaggtacaacaacttacaaattaaatgttggtgattattttgtgctgacatcacatacagtaatgccattaagtgcacctacactagtgccacaagagcactatgttagaattactggcttatacccaacactcaatatctcagatgagttttctagcaatgttgcaaattatcaaaaggttggtatgcaaaagtattctacactccagggaccacctggtactggtaagagtcattttgctattggcctagctctctactacccttctgctcgcatagtgtatacagcttgctctcatgccgctgttgatgcactatgtgagaaggcattaaaatatttgcctatagataaatgtagtagaattatacctgcacgtgctcgtgtagagtgttttgataaattcaaagtgaattcaacattagaacagtatgtcttttgtactgtaaatgcattgcctgagacgacagcagatatagttgtctttgatgaaatttcaatggccacaaattatgatttgagtgttgtcaatgccagattacgtgctaagcactatgtgtacattggcgaccctgctcaattacctgcaccacgcacattgctaactaagggcacactagaaccagaatatttcaattcagtgtgtagacttatgaaaactataggtccagacatgttcctcggaacttgtcggcgttgtcctgctgaaattgttgacactgtgagtgctttggtttatgataataagcttaaagcacataaagacaaatcagctcaatgctttaaaatgttttataagggtgttatcacgcatgatgtttcatctgcaattaacaggccacaaataggcgtggtaagagaattccttacacgtaaccctgcttggagaaaagctgtctttatttcaccttataattcacagaatgctgtagcctcaaagattttgggactaccaactcaaactgttgattcatcacagggctcagaatatgactatgtcatattcactcaaaccactgaaacagctcactcttgtaatgtaaacagatttaatgttgctattaccagagcaaaagtaggcatactttgcataatgtctgatagagacctttatgacaagttgcaatttacaagtcttgaaattccacgtaggaatgtggcaactttacaagctgaaaatgtaacaggactctttaaagattgtagtaaggtaatcactgggttacatcctacacaggcacctacacacctcagtgttgacactaaattcaaaactgaaggtttatgtgttgacatacctggcatacctaaggacatgacctatagaagactcatctctatgatgggttttaaaatgaattatcaagttaatggttaccctaacatgtttatcacccgcgaagaagctataagacatgtacgtgcatggattggcttcgatgtcgaggggtgtcatgctactagagaagctgttggtaccaatttacctttacagctaggtttttctacaggtgttaacctagttgctgtacctacaggttatgttgatacacctaataatacagatttttccagagttagtgctaaaccaccgcctggagatcaatttaaacacctcataccacttatgtacaaaggacttccttggaatgtagtgcgtataaagattgtacaaatgttaagtgacacacttaaaaatctctctgacagagtcgtatttgtcttatgggcacatggctttgagttgacatctatgaagtattttgtgaaaataggacctgagcgcacctgttgtctatgtgatagacgtgccacatgcttttccactgcttcagacacttatgcctgttggcatcattctattggatttgattacgtctataatccgtttatgattgatgttcaacaatggggttttacaggtaacctacaaagcaaccatgatctgtattgtcaagtccatggtaatgcacatgtagctagttgtgatgcaatcatgactaggtgtctagctgtccacgagtgctttgttaagcgtgttgactggactattgaatatcctataattggtgatgaactgaagattaatgcggcttgtagaaaggttcaacacatggttgttaaagctgcattattagcagacaaattcccagttcttcacgacattggtaaccctaaagctattaagtgtgtacctcaagctgatgtagaatggaagttctatgatgcacagccttgtagtgacaaagcttataaaatagaagaattattctattcttatgccacacattctgacaaattcacagatggtgtatgcctattttggaattgcaatgtcgatagatatcctgctaattccattgtttgtagatttgacactagagtgctatctaaccttaacttgcctggttgtgatggtggcagtttgtatgtaaataaacatgcattccacacaccagcttttgataaaagtgcttttgttaatttaaaacaattaccatttttctattactctgacagtccatgtgagtctcatggaaaacaagtagtgtcagatatagattatgtaccactaaagtctgctacgtgtataacacgttgcaatttaggtggtgctgtctgtagacatcatgctaatgagtacagattgtatctcgatgcttataacatgatgatctcagctggctttagcttgtgggtttacaaacaatttgatacttataacctctggaacacttttacaagacttcagagtttagaaaatgtggcttttaatgttgtaaataagggacactttgatggacaacagggtgaagtaccagtttctatcattaataacactgtttacacaaaagttgatggtgttgatgtagaattgtttgaaaataaaacaacattacctgttaatgtagcatttgagctttgggctaagcgcaacattaaaccagtaccagaggtgaaaatactcaataatttgggtgtggacattgctgctaatactgtgatctgggactacaaaagagatgctccagcacatatatctactattggtgtttgttctatgactgacatagccaagaaaccaactgaaacgatttgtgcaccactcactgtcttttttgatggtagagttgatggtcaagtagacttatttagaaatgcccgtaatggtgttcttattacagaaggtagtgttaaaggtttacaaccatctgtaggtcccaaacaagctagtcttaatggagtcacattaattggagaagccgtaaaaacacagttcaattattataagaaagttgatggtgttgtccaacaattacctgaaacttactttactcagagtagaaatttacaagaatttaaacccaggagtcaaatggaaattgatttcttagaattagctatggatgaattcattgaacggtataaattagaaggctatgccttcgaacatatcgtttatggagattttagtcatagtcagttaggtggtttacatctactgattggactagctaaacgttttaaggaatcaccttttgaattagaagattttattcctatggacagtacagttaaaaactatttcataacagatgcgcaaacaggttcatctaagtgtgtgtgttctgttattgatttattacttgatgattttgttgaaataataaaatcccaagatttatctgtagtttctaaggttgtcaaagtgactattgactatacagaaatttcatttatgctttggtgtaaagatggccatgtagaaacattttacccaaaattacaatctagtcaagcgtggcaaccgggtgttgctatgcctaatctttacaaaatgcaaagaatgctattagaaaagtgtgaccttcaaaattatggtgatagtgcaacattacctaaaggcataatgatgaatgtcgcaaaatatactcaactgtgtcaatatttaaacacattaacattagctgtaccctataatatgagagttatacattttggtgctggttctgataaaggagttgcaccaggtacagctgttttaagacagtggttgcctacgggtacgctgcttgtcgattcagatcttaatgactttgtctctgatgcagattcaactttgattggtgattgtgcaactgtacatacagctaataaatgggatctcattattagtgatatgtacgaccctaagactaaaaatgttacaaaagaaaatgactctaaagagggttttttcacttacatttgtgggtttatacaacaaaagctagctcttggaggttccgtggctataaagataacagaacattcttggaatgctgatctttataagctcatgggacacttcgcatggtggacagcctttgttactaatgtgaatgcgtcatcatctgaagcatttttaattggatgtaattatcttggcaaaccacgcgaacaaatagatggttatgtcatgcatgcaaattacatattttggaggaatacaaatccaattcagttgtcttcctattctttatttgacatgagtaaatttccccttaaattaaggggtactgctgttatgtctttaaaagaaggtcaaatcaatgatatgattttatctcttcttagtaaaggtagacttataattagagaaaacaacagagttgttatttctagtgatgttcttgttaacaactaaacgaacaatgtttgtttttcttgttttattgccactagtctctagtcagtgtgttaatcttacaaccagaactcaattaccccctgcatacactaattctttcacacgtggtgtttattaccctgacaaagttttcagatcctcagttttacattcaactcaggacttgttcttacctttcttttccaatgttacttggttccatgctatacatgtctctgggaccaatggtactaagaggtttgataaccctgtcctaccatttaatgatggtgtttattttgcttccactgagaagtctaacataataagaggctggatttttggtactactttagattcgaagacccagtccctacttattgttaataacgctactaatgttgttattaaagtctgtgaatttcaattttgtaatgatccatttttgggtgtttattaccacaaaaacaacaaaagttggatggaaagtgagttcagagtttattctagtgcgaataattgcacttttgaatatgtctctcagccttttcttatggaccttgaaggaaaacagggtaatttcaaaaatcttagggaatttgtgtttaagaatattgatggttattttaaaatatattctaagcacacgcctattaatttagtgcgtgatctcccccagggtttttcggctttagaaccattggtagatttgccaataggtattaacatcactaggtttcaaactttacttgctttacatagaagttatttgactcctggtgattcttcttcaggttggacagctggtgctgcagcttattatgtgggttatcttcaacctaggacttttctattaaaatataatgaaaatggaaccattacagatgctgtagactgtgcacttgaccctctctcagaaacaaagtgtacgttgaaatccttcactgtagaaaaaggaatctatcaaacttctaactttagagtccaaccaacagaatctattgttagatttcctaatattacaaacttgtgcccttttggtgaagtttttaacgccaccagatttgcatctgtttatgcttggaacaggaagagaatcagcaactgtgttgctgattattctgtcctatataattccgcatcattttccacttttaagtgttatggagtgtctcctactaaattaaatgatctctgctttactaatgtctatgcagattcatttgtaattagaggtgatgaagtcagacaaatcgctccagggcaaactggaaagattgctgattataattataaattaccagatgattttacaggctgcgttatagcttggaattctaacaatcttgattctaaggttggtggtaattataattacctgtatagattgtttaggaagtctaatctcaaaccttttgagagagatatttcaactgaaatctatcaggccggtagcacaccttgtaatggtgttgaaggttttaattgttactttcctttacaatcatatggtttccaacccactaatggtgttggttaccaaccatacagagtagtagtactttcttttgaacttctacatgcaccagcaactgtttgtggacctaaaaagtctactaatttggttaaaaacaaatgtgtcaatttcaacttcaatggtttaacaggcacaggtgttcttactgagtctaacaaaaagtttctgcctttccaacaatttggcagagacattgctgacactactgatgctgtccgtgatccacagacacttgagattcttgacattacaccatgttcttttggtggtgtcagtgttataacaccaggaacaaatacttctaaccaggttgctgttctttatcaggatgttaactgcacagaagtccctgttgctattcatgcagatcaacttactcctacttggcgtgtttattctacaggttctaatgtttttcaaacacgtgcaggctgtttaataggggctgaacatgtcaacaactcatatgagtgtgacatacccattggtgcaggtatatgcgctagttatcagactcagactaattctcctcggcgggcacgtagtgtagctagtcaatccatcattgcctacactatgtcacttggtgcagaaaattcagttgcttactctaataactctattgccatacccacaaattttactattagtgttaccacagaaattctaccagtgtctatgaccaagacatcagtagattgtacaatgtacatttgtggtgattcaactgaatgcagcaatcttttgttgcaatatggcagtttttgtacacaattaaaccgtgctttaactggaatagctgttgaacaagacaaaaacacccaagaagtttttgcacaagtcaaacaaatttacaaaacaccaccaattaaagattttggtggttttaatttttcacaaatattaccagatccatcaaaaccaagcaagaggtcatttattgaagatctacttttcaacaaagtgacacttgcagatgctggcttcatcaaacaatatggtgattgccttggtgatattgctgctagagacctcatttgtgcacaaaagtttaacggccttactgttttgccacctttgctcacagatgaaatgattgctcaatacacttctgcactgttagcgggtacaatcacttctggttggacctttggtgcaggtgctgcattacaaataccatttgctatgcaaatggcttataggtttaatggtattggagttacacagaatgttctctatgagaaccaaaaattgattgccaaccaatttaatagtgctattggcaaaattcaagactcactttcttccacagcaagtgcacttggaaaacttcaagatgtggtcaaccaaaatgcacaagctttaaacacgcttgttaaacaacttagctccaattttggtgcaatttcaagtgttttaaatgatatcctttcacgtcttgacaaagttgaggctgaagtgcaaattgataggttgatcacaggcagacttcaaagtttgcagacatatgtgactcaacaattaattagagctgcagaaatcagagcttctgctaatcttgctgctactaaaatgtcagagtgtgtacttggacaatcaaaaagagttgatttttgtggaaagggctatcatcttatgtccttccctcagtcagcacctcatggtgtagtcttcttgcatgtgacttatgtccctgcacaagaaaagaacttcacaactgctcctgccatttgtcatgatggaaaagcacactttcctcgtgaaggtgtctttgtttcaaatggcacacactggtttgtaacacaaaggaatttttatgaaccacaaatcattactacagacaacacatttgtgtctggtaactgtgatgttgtaataggaattgtcaacaacacagtttatgatcctttgcaacctgaattagactcattcaaggaggagttagataaatattttaagaatcatacatcaccagatgttgatttaggtgacatctctggcattaatgcttcagttgtaaacattcaaaaagaaattgaccgcctcaatgaggttgccaagaatttaaatgaatctctcatcgatctccaagaacttggaaagtatgagcagtatataaaatggccatggtacatttggctaggttttatagctggcttgattgccatagtaatggtgacaattatgctttgctgtatgaccagttgctgtagttgtctcaagggctgttgttcttgtggatcctgctgcaaatttgatgaagacgactctgagccagtgctcaaaggagtcaaattacattacacataaacgaacttatggatttgtttatgagaatcttcacaattggaactgtaactttgaagcaaggtgaaatcaaggatgctactccttcagattttgttcgcgctactgcaacgataccgatacaagcctcactccctttcggatggcttattgttggcgttgcacttcttgctgtttttcagagcgcttccaaaatcataaccctcaaaaagagatggcaactagcactctccaagggtgttcactttgtttgcaacttgctgttgttgtttgtaacagtttactcacaccttttgctcgttgctgctggccttgaagccccttttctctatctttatgctttagtctacttcttgcagagtataaactttgtaagaataataatgaggctttggctttgctggaaatgccgttccaaaaacccattactttatgatgccaactattttctttgctggcatactaattgttacgactattgtataccttacaatagtgtaacttcttcaattgtcattacttcaggtgatggcacaacaagtcctatttctgaacatgactaccagattggtggttatactgaaaaatgggaatctggagtaaaagactgtgttgtattacacagttacttcacttcagactattaccagctgtactcaactcaattgagtacagacactggtgttgaacatgttaccttcttcatctacaataaaattgttgatgagcctgaagaacatgtccaaattcacacaatcgacggttcatccggagttgttaatccagtaatggaaccaatttatgatgaaccgacgacgactactagcgtgcctttgtaagcacaagctgatgagtacgaacttatgtactcattcgtttcggaagagacaggtacgttaatagttaatagcgtacttctttttcttgctttcgtggtattcttgctagttacactagccatccttactgcgcttcgattgtgtgcgtactgctgcaatattgttaacgtgagtcttgtaaaaccttctttttacgtttactctcgtgttaaaaatctgaattcttctagagttcctgatcttctggtctaaacgaactaaatattatattagtttttctgtttggaactttaattttagccatggcagattccaacggtactattaccgttgaagagcttaaaaagctccttgaacaatggaacctagtaataggtttcctattccttacatggatttgtcttctacaatttgcctatgccaacaggaataggtttttgtatataattaagttaattttcctctggctgttatggccagtaactttagcttgttttgtgcttgctgctgtttacagaataaattggatcaccggtggaattgctatcgcaatggcttgtcttgtaggcttgatgtggctcagctacttcattgcttctttcagactgtttgcgcgtacgcgatccatgtggtcattcaatccagaaactaacattcttctcaacgtgccactccatggcactattctgaccagaccgcttctagaaagtgaactcgtaatcggagctgtgatccttcgtggacatcttcgtattgctggacaccatctaggacgctgtgacatcaaggacctgcctaaagaaatcactgttgctacatcacgaacgctttcttattacaaattgggagcttcgcagcgtgtagcaggtgactcaggttttgctgcatacagtcgctacaggattggcaactataaattaaacacagaccattccagtagcagtgacaatattgctttgcttgtacagtaagtgacaacagatgtttcatctcgttgactttcaggttactatagcagagatattactaattattatgaggacttttaaagtttccatttggaatcttgattacatcataaacctcataattaaaaatttatctaagtcactaactgagaataaatattctcaattagatgaagagcaaccaatggagattgattaaacgaacatgaaaattattcttttcttggcactgataacactcgctacttgtgagctttatcactaccaagagtgtgttagaggtacaacagtacttttaaaagaaccttgctcttctggaacatacgagggcaattcaccatttcatcctctagctgataacaaatttgcactgacttgctttagcactcaatttgcttttgcttgtcctgacggcgtaaaacacgtctatcagttacgtgccagatcagtttcacctaaactgttcatcagacaagaggaagttcaagaactttactctccaatttttcttattgttgcggcaatagtgtttataacactttgcttcacactcaaaagaaagacagaatgattgaactttcattaattgacttctatttgtgctttttagcctttctgctattccttgttttaattatgcttattatcttttggttctcacttgaactgcaagatcataatgaaacttgtcacgcctaaacgaacatgaaatttcttgttttcttaggaatcatcacaactgtagctgcatttcaccaagaatgtagtttacagtcatgtactcaacatcaaccatatgtagttgatgacccgtgtcctattcacttctattctaaatggtatattagagtaggagctagaaaatcagcacctttaattgaattgtgcgtggatgaggctggttctaaatcacccattcagtacatcgatatcggtaattatacagtttcctgtttaccttttacaattaattgccaggaacctaaattgggtagtcttgtagtgcgttgttcgttctatgaagactttttagagtatcatgacgttcgtgttgttttagatttcatctaaacgaacaaactaaaatgtctgataatggaccccaaaatcagcgaaatgcaccccgcattacgtttggtggaccctcagattcaactggcagtaaccagaatggagaacgcagtggggcgcgatcaaaacaacgtcggccccaaggtttacccaataatactgcgtcttggttcaccgctctcactcaacatggcaaggaagaccttaaattccctcgaggacaaggcgttccaattaacaccaatagcagtccagatgaccaaattggctactaccgaagagctaccagacgaattcgtggtggtgacggtaaaatgaaagatctcagtccaagatggtatttctactacctaggaactgggccagaagctggacttccctatggtgctaacaaagacggcatcatatgggttgcaactgagggagccttgaatacaccaaaagatcacattggcacccgcaatcctgctaacaatgctgcaatcgtgctacaacttcctcaaggaacaacattgccaaaaggcttctacgcagaagggagcagaggcggcagtcaagcctcttctcgttcctcatcacgtagtcgcaacagttcaagaaattcaactccaggcagcagtaggggaacttctcctgctagaatggctggcaatggcggtgatgctgctcttgctttgctgctgcttgacagattgaaccagcttgagagcaaaatgtctggtaaaggccaacaacaacaaggccaaactgtcactaagaaatctgctgctgaggcttctaagaagcctcggcaaaaacgtactgccactaaagcatacaatgtaacacaagctttcggcagacgtggtccagaacaaacccaaggaaattttggggaccaggaactaatcagacaaggaactgattacaaacattggccgcaaattgcacaatttgcccccagcgcttcagcgttcttcggaatgtcgcgcattggcatggaagtcacaccttcgggaacgtggttgacctacacaggtgccatcaaattggatgacaaagatccaaatttcaaagatcaagtcattttgctgaataagcatattgacgcatacaaaacattcccaccaacagagcctaaaaaggacaaaaagaagaaggctgatgaaactcaagccttaccgcagagacagaagaaacagcaaactgtgactcttcttcctgctgcagatttggatgatttctccaaacaattgcaacaatccatgagcagtgctgactcaactcaggcctaaactcatgcagaccacacaaggcagatgggctatataaacgttttcgcttttccgtttacgatatatagtctactcttgtgcagaatgaattctcgtaactacatagcacaagtagatgtagttaactttaatctcacatagcaatctttaatcagtgtgtaacattagggaggacttgaaagagccaccacattttcaccgaggccacgcggagtacgatcgagtgtacagtgaacaatgctagggagagctgcctatatggaagagccctaatgtgtaaaattaattttagtagtgctatccccatgtgattttaatagcttcttaggagaatgacaaaaaaaaaaaaaaaaaaaaaaaaaaaaaaaaaaaaaaaaaaaaaaaaaaaaaaaaaaagggtcggcatggcatctccacctcctcgcggtccgacctgggcatccgaaggaggacgcacgtccactcggatggctaagggagcagcacactggcggccgttactagggccgcgcccttcccaacagttgcgcagcctgaatggcgaatggagatccaatttttaagtgtataatgtgttaaactactgattctaattgtttgtgtattttagattcacagtcccaaggctcatttcaggcccctcagtcctcacagtctgttcatgatcataatcagccataccacatttgtagaggttttacttgctttaaaaaacctcccacacctccccctgaacctgaaacataaaatgaatgcaattgttgttgttaacttgtttattgcagcttataatggttacaaataaagcaatagcatcacaaatttcacaaataaagcatttttttcactgcattctagttgtggtttgtccaaactcatcaatgtatcttaaagcttgagtattctatagtctcacctaaatagcttggcgtaatcatggtcatagctgtttcctgtgtgaaattgttatccgctcacaattccacacaacatacgagccggaagcataaagtgtaaagcctggggtgcctaatgagtgagctaactcacattaattgcgttgcgctcactgcccgctttccagtcgggaaacctgtcgtgccagctgcattaatgaatcggccaacgcgaaccccttgcggccgcccgggccgtcgaccaattctcatgtttgacagcttatcatcgaatttctgccattcatccgcttattatcacttattcaggcgtagcaaccaggcgtttaagggcaccaataactgccttaaaaaaattacgccccgccctgccactcatcgcagtactgttgtaattcattaagcattctgccgacatggaagccatcacaaacggcatgatgaacctgaatcgccagcggcatcagcaccttgtcgccttgcgtataatatttgcccatggtgaaaacgggggcgaagaagttgtccatattggccacgtttaaatcaaaactggtgaaactcacccagggattggctgagacgaaaaacatattctcaataaaccctttagggaaataggccaggttttcaccgtaacacgccacatcttgcgaatatatgtgtagaaactgccggaaatcgtcgtggtattcactccagagcgatgaaaacgtttcagtttgctcatggaaaacggtgtaacaagggtgaacactatcccatatcaccagctcaccgtctttcattgccatacgaaattccggatgagcattcatcaggcgggcaagaatgtgaataaaggccggataaaacttgtgcttatttttctttacggtctttaaaaaggccgtaatatccagctgaacggtctggttataggtacattgagcaactgactgaaatgcctcaaaatgttctttacgatgccattgggatatatcaacggtggtatatccagtgatttttttctccattttagcttccttagctcctgaaaatctcgataactcaaaaaatacgcccggtagtgatcttatttcattatggtgaaagttggaacctcttacgtgccgatcaacgtctcattttcgccaaaagttggcccagggcttcccggtatcaacagggacaccaggatttatttattctgcgaagtgatcttccgtcacaggtatttattcgcgataagctcatggagcggcgtaaccgtcgcacaggaaggacagagaaagcgcggatctgggaagtgacggacagaacggtcaggacctggattggggaggcggttgccgccgctgctgctgacggtgtgacgttctctgttccggtcacaccacatacgttccgccattcctatgcgatgcacatgctgtatgccggtataccgctgaaagttctgcaaagcctgatgggacataagtccatcagttcaacggaagtctacacgaaggtttttgcgctggatgtggctgcccggcaccgggtgcagtttgcgatgccggagtctgatgcggttgcgatgctgaaacaattatcctgagaataaatgccttggcctttatatggaaatgtggaactgagtggatatgctgtttttgtctgttaaacagagaagctggctgttatccactgagaagcgaacgaaacagtcgggaaaatctcccattatcgtagagatccgcattattaatctcaggagcctgtgtagcgtttataggaagtagtgttctgtcatgatgcctgcaagcggtaacgaaaacgatttgaatatgccttcaggaacaatagaaatcttcgtgcggtgttacgttgaagtggagcggattatgtcagcaatggacagaacaacctaatgaacacagaaccatgatgtggtctgtccttttacagccagtagtgctcgccgcagtcgagcgacagggcgaagccctcggctggttgccctcgccgctgggctggcggccgtctatggccctgcaaacgcgccagaaacgccgtcgaagccgtgtgcgagacaccgcggccggccgccggcgttgtggatacctcgcggaaaacttggccctcactgacagatgaggggcggacgttgacacttgaggggccgactcacccggcgcggcgttgacagatgaggggcaggctcgatttcggccggcgacgtggagctggccagcctcgcaaatcggcgaaaacgcctgattttacgcgagtttcccacagatgatgtggacaagcctggggataagtgccctgcggtattgacacttgaggggcgcgactactgacagatgaggggcgcgatccttgacacttgaggggcagagtgctgacagatgaggggcgcacctattgacatttgaggggctgtccacaggcagaaaatccagcatttgcaagggtttccgcccgtttttcggccaccgctaacctgtcttttaacctgcttttaaaccaatatttataaaccttgtttttaaccagggctgcgccctgtgcgcgtgaccgcgcacgccgaaggggggtgcccccccttctcgaaccctcccggtcgagtgagcgaggaagcaccagggaacagcacttatatattctgcttacacacgatgcctgaaaaaacttcccttggggttatccacttatccacggggatatttttataattattttttttatagtttttagatcttcttttttagagcgccttgtaggcctttatccatgctggttctagagaaggtgttgtgacaaattgccctttcagtgtgacaaatcaccctcaaatgacagtcctgtctgtgacaaattgcccttaaccctgtgacaaattgccctcagaagaagctgttttttcacaaagttatccctgcttattgactcttttttatttagtgtgacaatctaaaaacttgtcacacttcacatggatctgtcatggcggaaacagcggttatcaatcacaagaaacgtaaaaatagcccgcgaatcgtccagtcaaacgacctcactgaggcggcatatagtctctcccgggatcaaaaacgtatgctgtatctgttcgttgaccagatcagaaaatctgatggcaccctacaggaacatgacggtatctgcgagatccatgttgctaaatatgctgaaatattcggattgacctctgcggaagccagtaaggatatacggcaggcattgaagagtttcgcggggaaggaagtggttttttatcgccctgaagaggatgccggcgatgaaaaaggctatgaatcttttccttggtttatcaaacgtgcgcacagtccatccagagggctttacagtgtacatatcaacccatatctcattcccttctttatcgggttacagaaccggtttacgcagtttcggcttagtgaaacaaaagaaatcaccaatccgtatgccatgcgtttatacgaatccctgtgtcagtatcgtaagccggatggctcaggcatcgtctctctgaaaatcgactggatcatagagcgttaccagctgcctcaaagttaccagcgtatgcctgacttccgccgccgcttcctgcaggtctgtgttaatgagatcaacagcagaactccaatgcgcctctcatacattgagaaaaagaaaggccgccagacgactcatatcgtattttccttccgcgatatcacttccatgacgacaggatagtctgagggttatctgtcacagatttgagggtggttcgtcacatttgttctgacctactgagggtaatttgtcacagttttgctgtttccttcagcctgcatggattttctcatactttttgaactgtaatttttaaggaagccaaatttgagggcagtttgtcacagttgatttccttctctttcccttcgtcatgtgacctgatatcgggggttagttcgtcatcattgatgagggttgattatcacagtttattactctgaattggctatccgcgtgtgtacctctacctggagtttttcccacggtggatatttcttcttgcgctgagcgtaagagctatctgacagaacagttcttctttgcttcctcgccagttcgctcgctatgctcggttacacggctgcggcg

SEQ ID NO: 22 - DNA, 35283 bp, Artificial Sequence
  Clone pCCI-4K-SARS-CoV-2-WDWWD. Based on SARS-CoV-2.
gatgtgctgcaaggcgattaagttgggtaacgccagggttttcccagtcacgacgttgtaaaacgacggccagtgaattgtaatacgactcactatagggcgaattctagttattaatagtaatcaattacggggtcattagttcatagcccatatatggagttccgcgttacataacttacggtaaatggcccgcctggctgaccgcccaacgacccccgcccattgacgtcaataatgacgtatgttcccatagtaacgccaatagggactttccattgacgtcaatgggtggagtatttacggtaaactgcccacttggcagtacatcaagtgtatcatatgccaagtacgccccctattgacgtcaatgacggtaaatggcccgcctggcattatgcccagtacatgaccttatgggactttcctacttggcagtacatctacgtattagtcatcgctattaccatggtgatgcggttttggcagtacatcaatgggcgtggatagcggtttgactcacggggatttccaagtctccaccccattgacgtcaatgggagtttgttttggcaccaaaatcaacgggactttccaaaatgtcgtaacaactccgccccattgacgcaaatgggcggtaggcgtgtacggtgggaggtctatataagcagagctggtttagtgaaccgtattaaaggtttataccttcccaggtaacaaaccaaccaactttcgatctcttgtagatctgttctctaaacgaactttaaaatctgtgtggctgtcactcggctgcatgcttagtgcactcacgcagtataattaataactaattactgtcgttgacaggacacgagtaactcgtctatcttctgcaggctgcttacggtttcgtccgtgttgcagccgatcatcagcacatctaggtttcgtccgggtgtgaccgaaaggtaagatggagagccttgtccctggtttcaacgagaaaacacacgtccaactcagtttgcctgttttacaggttcgcgacgtgctcgtacgtggctttggagactccgtggaggaggtcttatcagaggcacgtcaacatcttaaagatggcacttgtggcttagtagaagttgaaaaaggcgttttgcctcaacttgaacagccctatgtgttcatcaaacgttcggatgctcgaactgcacctcatggtcatgttatggttgagctggtagcagaactcgaaggcattcagtacggtcgtagtggtgagacacttggtgtccttgtccctcatgtgggcgaaataccagtggcttaccgcaaggttcttcttcgtaagaacggtaataaaggagctggtggccatagttacggcgccgatctaaagtcatttgacttaggcgacgagcttggcactgatccttatgaagattttcaagaaaactggaacactaaacatagcagtggtgttacccgtgaactcatgcgtgagcttaacggaggggcatacactcgctatgtcgataacaacttctgtggccctgatggctaccctcttgagtgcattaaagaccttctagcacgtgctggtaaagcttcatgcactttgtccgaacaactggactttattgacactaagaggggtgtatactgctgccgtgaacatgagcatgaaattgcttggtacacggaacgttctgaaaagagctatgaattgcagacaccttttgaaattaaattggcaaagaaatttgacaccttcaatggggaatgtccaaattttgtatttcccttaaattccataatcaagactattcaaccaagggttgaaaagaaaaagcttgatggctttatgggtagaattcgatctgtctatccagttgcgtcaccaaatgaatgcaaccaaatgtgcctttcaactctcatgaagtgtgatcattgtggtgaaacttcatggcagacgggcgattttgttaaagccacttgcgaattttgtggcactgagaatttgactaaagaaggtgccactacttgtggttacttaccccaaaatgctgttgttaaaatttattgtccagcatgtcacaattcagaagtaggacctgagcatagtcttgccgaataccataatgaatctggcttgaaaaccattcttcgtaagggtggtcgcactattgcctttggaggctgtgtgttctcttatgttggttgccataacaagtgtgcctattgggtcccacgtgctagcgctaacataggttgtaaccatacaggtgttgttggagaaggttccgaaggtcttaatgacaaccttcttgaaatactccaaaaagagaaagtcaacatcaatattgttggtgactttaaacttaatgaagagatcgccattattttggcatctttttctgcttccacaagtgcttttgtggaaactgtgaaaggtttggattataaagcattcaaacaaattgttgaatcctgtggtaattttaaagttacaaaaggaaaagctaaaaaaggtgcctggaatattggtgaacagaaatcaatactgagtcctctttatgcatttgcatcagaggctgctcgtgttgtacgatcaattttctcccgcactcttgaaactgctcaaaattctgtgcgtgttttacagaaggccgctataacaatactagatggaatttcacagtattcactgagactcattgatgctatgatgttcacatctgatttggctactaacaatctagttgtaatggcctacattacaggtggtgttgttcagttgacttcgcagtggctaactaacatctttggcactgtttatgaaaaactcaaacccgtccttgattggcttgaagagaagtttaaggaaggtgtagagtttcttagagacggttgggaaattgttaaatttatctcaacctgtgcttgtgaaattgtcggtggacaaattgtcacctgtgcaaaggaaattaaggagagtgttcagacattctttaagcttgtaaataaatttttggctttgtgtgctgactctatcattattggtggagctaaacttaaagccttgaatttaggtgaaacatttgtcacgcactcaaagggattgtacagaaagtgtgttaaatccagagaagaaactggcctactcatgcctctaaaagccccaaaagaaattatcttcttagagggagaaacacttcccacagaagtgttaacagaggaagttgtcttgaaaactggtgatttacaaccattagaacaacctactagtgaagctgttgaagctccattggttggtacaccagtttgtattaacgggcttatgttgctcgaaatcaaagacacagaaaagtactgtgcccttgcacctaatatgatggtaacaaacaataccttcacactcaaaggcggtgcaccaacaaaggttacttttggtgatgacactgtgatagaagtgcaaggttacaagagtgtgaatatcacttttgaacttgatgaaaggattgataaagtacttaatgagaagtgctctgcctatacagttgaactcggtacagaagtaaatgagttcgcctgtgttgtggcagatgctgtcataaaaactttgcaaccagtatctgaattacttacaccactgggcattgatttagatgagtggagtatggctacatactacttatttgatgagtctggtgagtttaaattggcttcacatatgtattgttctttctaccctccagatgaggatgaagaagaaggtgattgtgaagaagaagagtttgagccatcaactcaatatgagtatggtactgaagatgattaccaaggtaaacctttggaatttggtgccacttctgctgctcttcaacctgaagaagagcaagaagaagattggttagatgatgatagtcaacaaactgttggtcaacaagacggcagtgaggacaatcagacaactactattcaaacaattgttgaggttcaacctcaattagagatggaacttacaccagttgttcagactattgaagtgaatagttttagtggttatttaaaacttactgacaatgtatacattaaaaatgcagacattgtggaagaagctaaaaaggtaaaaccaacagtggttgttaatgcagccaatgtttaccttaaacatggaggaggtgttgcaggagccttaaataaggctactaacaatgccatgcaagttgaatctgatgattacatagctactaatggaccacttaaagtgggtggtagttgtgttttaagcggacacaatcttgctaaacactgtcttcatgttgtcggcccaaatgttaacaaaggtgaagacattcaacttcttaagagtgcttatgaaaattttaatcagcacgaagttctacttgcaccattattatcagctggtatttttggtgctgaccctatacattctttaagagtttgtgtagatactgttcgcacaaatgtctacttagctgtctttgataaaaatctctatgacaaacttgtttcaagctttttggaaatgaagagtgaaaagcaagttgaacaaaagatcgctgagattcctaaagaggaagttaagccatttataactgaaagtaaaccttcagttgaacagagaaaacaagatgataagaaaatcaaagcttgtgttgaagaagttacaacaactctggaagaaactaagttcctcacagaaaacttgttactttatattgacattaatggcaatcttcatccagattctgccactcttgttagtgacattgacatcactttcttaaagaaagatgctccatatatagtgggtgatgttgttcaagagggtgttttaactgctgtggttatacctactaaaaaggctggtggcactactgaaatgctagcgaaagctttgagaaaagtgccaacagacaattatataaccacttacccgggtcaaggtttaaatggttatacggtagaagaagcgaaaacggtactaaaaaaatgtaaatcggcgttttatatactaccgtcgataatatcgaatgaaaaacaagaaatactaggtacggtatcgtggaatttacgtgaaatgctagcgcatgcggaagaaacacgtaaattaatgccggtatgtgtagaaacgaaagcgatagtatcgacgatacaacgtaaatataaaggtataaaaatacaagaaggtgtagtagattatggtgcgcgtttttatttttatacgtcgaaaacgacggtagcgtcgctaataaatacgctaaatgatctaaatgaaacgctagtaacgatgccgctaggttatgtaacgcatggtttaaatttagaagaagcggcgcgttatatgcgttcgctaaaagtaccggcgacggtatcggtatcgtcgccggatgcggtaacggcgtataatggttatctaacgtcgtcgtcgaaaacgccggaagaacattttatagaaacgatatcgctagcgggttcgtataaagattggtcgtattcgggtcaatcgacgcaactaggtatagaatttctaaaacgtggtgataaatcggtatattatacgtcgaatccgacgacgtttcatctagatggtgaagtaataacgtttgataatctaaaaacgctactatcgttacgtgaagtacgtacgataaaagtatttacgacggtagataatataaatctacatacgcaagtagtagatatgtcgatgacatatggacaacaatttggtccgacgtatttagatggtgcggatgttacgaaaataaaaccgcataattcgcatgaaggtaaaacgttttatgtattaccgaatgatgatacgctacgtgtagaagcgtttgaatattatcatacgactgatccgtcgtttctaggtcgttatatgtcggcgttaaatcatacgaaaaaatggaaatatccgcaagtaaatggtttaacgtcgataaaatgggcggataataattgttatctagcgacggcgttattaacgctacaacaaatagaattaaaatttaatccgccggcgctacaagatgcgtattatcgtgcgcgtgcgggtgaagcggcgaatttttgtgcgctaatattagcgtattgtaataaaacggtaggtgaattaggtgatgtacgtgaaacgatgtcgtatttatttcaacatgcgaatttagattcgtgtaaacgtgtattaaatgtagtatgtaaaacgtgtggtcaacaacaaacgacgctaaaaggtgtagaagcggtaatgtatatgggtacgctatcgtatgaacaatttaaaaaaggtgtacaaataccgtgtacgtgtggtaaacaagcgacgaaatatctagtacaacaagaatcgccgtttgtaatgatgtcggcgccgccggcgcaatatgaactaaaacatggtacgtttacgtgtgcgtcggaatatacgggtaattatcaatgtggtcattataaacatataacgtcgaaagaaacgttatattgtatagatggtgcgttacttacgaaatcgtcggaatataaaggtccgataacggatgtattttataaagaaaattcgtatacgacgacgataaaaccggtaacgtataaattagatggtgtagtatgtacggaaatagatccgaaattagataattattataaaaaagataattcgtattttacggaacaaccgatagatctagtaccgaatcaaccatatccgaatgcgtcgtttgataattttaaatttgtatgtgataatataaaatttgcggatgatttaaatcaattaacgggttataaaaaaccggcgtcgcgtgaactaaaagtaacgttttttccggatttaaatggtgatgtagtagcgatagattataaacattatacgccgtcgtttaaaaaaggtgcgaaattattacataaaccgatagtatggcatgtaaataatgcgacgaataaagcgacgtataaaccgaatacgtggtgtatacggtgtctatggagcacgaaaccggtagaaacgtcgaattcgtttgatgtactaaaatcggaagatgcgcaaggtatggataatctagcgtgtgaagatctaaaaccggtatcggaagaagtagtagaaaatccgacgatacaaaaagatgtactggaatgtaatgtaaaaacgacggaagtagtaggtgatataatactaaaaccggctaataattcgttaaaaataacggaagaagtaggtcatacggatctaatggcggcgtatgtagataattcgtcgctaacgataaaaaaaccgaatgaattatcgcgtgtattaggtttaaaaacgctagcgacgcatggtttagctgctgtaaattcggtaccgtgggatacgatagcgaattatgcgaaaccgtttctaaataaagtagtatcgacgacgacgaatatagtaacgcgatgtttaaatcgtgtatgtacgaattatatgccgtatttttttacgttattactacaattatgtacgtttacgcgatcgacgaattcgcgtataaaagcgtcgatgccgacgacgatagcgaaaaatacggtaaaatcggtaggtaaattttgtctagaagcgtcgtttaattatttaaaatcgccgaatttttctaaactaataaatataataatatggtttttactattatcggtatgcctaggttctttaatctactcaaccgctgctttaggtgttttaatgtctaatttaggcatgccttcttactgtactggttacagagaaggctatttgaactctactaatgtcactattgcaacctactgtactggttctataccttgtagtgtttgtcttagtggtttagattctttagacacctatccttctttagaaactatacaaattaccatttcatcttttaaatgggatttaactgcttttggcttagttgcagagtggtttttggcatatattcttttcactaggtttttctatgtacttggattggctgcaatcatgcaattgtttttcagctattttgcagtacattttattagtaattcttggcttatgtggttaataattaatcttgtacaaatggccccgatttcagctatggttagaatgtacatcttctttgcatcattttattatgtatggaaaagttatgtgcatgttgtagacggttgtaattcatcaacttgtatgatgtgttacaaacgtaatagagcaacaagagtcgaatgtacaactattgttaatggtgttagaaggtccttttatgtctatgctaatggaggtaaaggcttttgcaaactacacaattggaattgtgttaattgtgatacattctgtgctggtagtacatttattagtgatgaagttgcgagagacttgtcactacagtttaaaagaccaataaatcctactgaccagtcttcttacatcgttgatagtgttacagtgaagaatggttccatccatctttactttgataaagctggtcaaaagacttatgaaagacattctctctctcattttgttaacttagacaacctgagagctaataacactaaaggttcattgcctattaatgttatagtttttgatggtaaatcaaaatgtgaagaatcatctgcaaaatcagcgtctgtttactacagtcagcttatgtgtcaacctatactgttactagatcaggcattagtgtctgatgttggtgatagtgcggaagttgcagttaaaatgtttgatgcttacgttaatacgttttcatcaacttttaacgtaccaatggaaaaactcaaaacactagttgcaactgcagaagctgaacttgcaaagaatgtgtccttagacaatgtcttatctacttttatttcagcagctcggcaagggtttgttgattcagatgtagaaactaaagatgttgttgaatgtcttaaattgtcacatcaatctgacatagaagttactggcgatagttgtaataactatatgctcacctataacaaagttgaaaacatgacaccccgtgaccttggtgcttgtattgactgtagtgcgcgtcatattaatgcgcaggtagcaaaaagtcacaacattgctttgatatggaacgttaaagatttcatgtcattgtctgaacaactacgaaaacaaatacgtagtgctgctaaaaagaataacttaccttttaagttgacatgtgcaactactagacaagttgttaatgttgtaacaacaaagatagcacttaagggtggtaaaattgttaataattggttgaagcagttaattaaagttacacttgtgttcctttttgttgctgctattttctatttaataacacctgttcatgtcatgtctaaacatactgacttttcaagtgaaatcataggatacaaggctattgatggtggtgtcactcgtgacatagcatctacagatacttgttttgctaacaaacatgctgattttgacacatggtttagccagcgtggtggtagttatactaatgacaaagcttgcccattgattgctgcagtcataacaagagaagtgggttttgtcgtgcctggtttgcctggcacgatattacgcacaactaatggtgactttttgcatttcttacctagagtttttagtgcagttggtaacatctgttacacaccatcaaaacttatagagtacactgactttgcaacatcagcttgtgttttggctgctgaatgtacaatttttaaagatgcttctggtaagccagtaccatattgttatgataccaatgtactagaaggttctgttgcttatgaaagtttacgccctgacacacgttatgtgctcatggatggctctattattcaatttcctaacacctaccttgaaggttctgttagagtggtaacaacttttgattctgagtactgtaggcacggcacttgtgaaagatcagaagctggtgtttgtgtatctactagtggtagatgggtacttaacaatgattattacagatctttaccaggagttttctgtggtgtagatgctgtaaatttacttactaatatgtttacaccactaattcaacctattggtgctttggacatatcagcatctatagtagctggtggtattgtagctatcgtagtaacatgccttgcctactattttatgaggtttagaagagcttttggtgaatacagtcatgtagttgcctttaatactttactattccttatgtcattcactgtactctgtttaacaccagtttactcattcttacctggtgtttattctgttatttacttgtacttgacattttatcttactaatgatgtttcttttttagcacatattcagtggatggttatgttcacacctttagtacctttctggataacaattgcttatatcatttgtatttccacaaagcatttctattggttctttagtaattacctaaagagacgtgtagtctttaatggtgtttcctttagtacttttgaagaagctgcgctgtgcacctttttgttaaataaagaaatgtatctaaagttgcgtagtgatgtgctattacctcttacgcaatataatagatacttagctctttataataagtacaagtattttagtggagcaatggatacaactagctacagagaagctgcttgttgtcatctcgcaaaggctctcaatgacttcagtaactcaggttctgatgttctttaccaaccaccacaaacctctatcacctcagctgttttgcagagtggttttagaaaaatggcattcccatctggtaaagttgagggttgtatggtacaagtaacttgtggtacaactacacttaacggtctttggcttgatgacgtagtttactgtccaagacatgtgatctgcacctctgaagacatgcttaaccctaattatgaagatttactcattcgtaagtctaatcataatttcttggtacaggctggtaatgttcaactcagggttattggacattctatgcaaaattgtgtacttaagcttaaggttgatacagccaatcctaagacacctaagtataagtttgttcgcattcaaccaggacagactttttcagtgttagcttgttacaatggttcaccatctggtgtttaccaatgtgctatgaggcccaatttcactattaagggttcattccttaatggttcatgtggtagtgttggttttaacatagattatgactgtgtctctttttgttacatgcaccatatggaattaccaactggagttcatgctggcacagacttagaaggtaacttttatggaccttttgttgacaggcaaacagcacaagcagctggtacggacacaactattacagttaatgttttagcttggttgtacgctgctgttataaatggagacaggtggtttctcaatcgatttaccacaactcttaatgactttaaccttgtggctatgaagtacaattatgaacctctaacacaagaccatgttgacatactaggacctctttctgctcaaactggaattgccgttttagatatgtgtgcttcattaaaagaattactgcaaaatggtatgaatggacgtaccatattgggtagtgctttattagaagatgaatttacaccttttgatgttgttagacaatgctcaggtgttactttccaaagtgcagtgaaaagaacaatcaagggtacacaccactggttgttactcacaattttgacttcacttttagttttagtccagagtactcaatggtctttgttcttttttttgtatgaaaatgcctttttaccttttgctatgggtattattgctatgtctgcttttgcaatgatgtttgtcaaacataagcatgcgtttctatgtttatttttattaccgtcgctagcgacggtagcgtattttaatatggtatatatgccggcgtcgtgggtaatgcgtataatgacgtggttagatatggtagatacgtcgttatcgggttttaaactaaaagattgtgtaatgtatgcgtcggcggtagtattactaatactaatgacggcgcgtacggtatatgatgatggtgcgcgtcgtgtatggacgctaatgaatgtattaacgctagtatataaagtatattatgggaatgcgttagatcaagcgatatcgatgtgggcgctaataatatcggtaacgtcgaattattcgggtgtagtaacgacggtaatgtttttagcgcgtggtatagtatttatgtgtgtagaatattgtccgatattttttataacgggtaatacactacaatgtataatgctagtatattgttttttaggttatttttgtacgtgttattttggtctattttgtttactaaatcgttattttcgtctaacactaggtgtatatgattatttagtatcgacgcaagaatttcgttatatgaattcgcaaggtctactaccgccgaaaaattcgatagatgcgtttaaactaaatataaaattattaggtgtaggtggtaaaccgtgtataaaagtagcgacggtacaatcgaaaatgtcggatgtaaaatgtacatcggtagtattactatcggtattacaacaactacgtgtagaatcgtcgtcgaaattatgggcgcaatgtgtacaattacataatgatatactattagcgaaagatacgacggaagcgtttgaaaaaatggtatcgctactatcggtattactatcgatgcaaggtgcggtagatataaataaactatgtgaagaaatgctagataatcgtgcgacgttacaagcgatagcgtcggaattttcgtcgctaccgtcgtatgcggcgtttgcgacggcgcaagaagcgtatgaacaagcggtagcgaatggtgattcggaagtagtactaaaaaaattaaaaaaatcgttaaatgtagcgaaatcggaatttgatcgtgatgcggcgatgcaacgtaaattagaaaaaatggcggatcaagcgatgacgcaaatgtataaacaagcgcgttcggaagataaacgtgcgaaagtaacgtcggcgatgcaaacgatgctatttacgatgctacgtaaattagataatgatgcgctaaataatataataaataatgcgcgtgatggttgtgtaccgttaaatataataccgctaacgacggcggcgaaactaatggtagtaataccggattataatacatataaaaatacgtgtgatggtacgacgtttacgtatgcgtcggcgttatgggaaatacaacaagtagtagatgcggattcgaaaatagtacaactatcggaaatatcgatggataattcgccgaatttagcgtggccgctaatagtaacggcgttacgtgcgaattcggcggtaaaattacaaaataatgaactatcgccggtagcgctacgacagatgtcttgtgctgccggtactacacaaactgcttgcactgatgacaatgcgttagcttactacaacacaacaaagggaggtaggtttgtacttgcactgttatccgatttacaggatttgaaatgggctagattccctaagagtgatggaactggtactatctatacagaactggaaccaccttgtaggtttgttacagacacacctaaaggtcctaaagtgaagtatttatactttattaaaggattaaacaacctaaatagaggtatggtacttggtagtttagctgccacagtacgtctacaagctggtaatgcaacagaagtgcctgccaattcaactgtattatctttctgtgcttttgctgtagatgctgctaaagcttacaaagattatctagctagtgggggacaaccaatcactaattgtgttaagatgttgtgtacacacactggtactggtcaggcaataacagttacaccggaagccaatatggatcaagaatcctttggtggtgcatcgtgttgtctgtactgccgttgccacatagatcatccaaatcctaaaggattttgtgacttaaaaggtaagtatgtacaaatacctacaacttgtgctaatgaccctgtgggttttacacttaaaaacacagtctgtaccgtctgcggtatgtggaaaggttatggctgtagttgtgatcaactccgcgaacccatgcttcagtcagctgatgcacaatcgtttttaaacgggtttgcggtgtaagtgcagcccgtcttacaccgtgcggcacaggcactagtactgatgtcgtatacagggcttttgacatctacaatgataaagtagctggttttgctaaattcctaaaaactaattgttgtcgcttccaagaaaaggacgaagatgacaatttaattgattcttactttgtagttaagagacacactttctctaactaccaacatgaagaaacaatttataatttacttaaggattgtccagctgttgctaaacatgacttctttaagtttagaatagacggtgacatggtaccacatatatcacgtcaacgtcttactaaatacacaatggcagacctcgtctatgctttaaggcattttgatgaaggtaattgtgacacattaaaagaaatacttgtcacatacaattgttgtgatgatgattatttcaataaaaaggactggtatgattttgtagaaaacccagatatattacgcgtatacgccaacttaggtgaacgtgtacgccaagctttgttaaaaacagtacaattctgtgatgccatgcgaaatgctggtattgttggtgtactgacattagataatcaagatctcaatggtaactggtatgatttcggtgatttcatacaaaccacgccaggtagtggagttcctgttgtagattcttattattcattgttaatgcctatattaaccttgaccagggctttaactgcagagtcacatgttgacactgacttaacaaagccttacattaagtgggatttgttaaaatatgacttcacggaagagaggttaaaactctttgaccgttattttaaatattgggatcagacataccacccaaattgtgttaactgtttggatgacagatgcattctgcattgtgcaaactttaatgttttattctctacagtgttcccacctacaagttttggaccactagtgagaaaaatatttgttgatggtgttccatttgtagtttcaactggataccacttcagagagctaggtgttgtacataatcaggatgtaaacttacatagctctagacttagttttaaggaattacttgtgtatgctgctgaccctgctatgcacgctgcttctggtaatctattactagataaacgcactacgtgcttttcagtagctgcacttactaacaatgttgcttttcaaactgtcaaacccggtaattttaacaaagacttctatgactttgctgtgtctaagggtttctttaaggaaggaagttctgttgaattaaaacacttcttctttgctcaggatggtaatgctgctatcagcgattatgactactatcgttataatctaccaacaatgtgtgatatcagacaactactatttgtagttgaagttgttgataagtactttgattgttacgatggtggctgtattaatgctaaccaagtcatcgtcaacaacctagacaaatcagctggttttccatttaataaatggggtaaggctagactttattatgattcaatgagttatgaggatcaagatgcacttttcgcatatacaaaacgtaatgtcatccctactataactcaaatgaatcttaagtatgccattagtgcaaagaatagagctcgcaccgtagctggtgtctctatctgtagtactatgaccaatagacagtttcatcaaaaattattgaaatcaatagccgccactagaggagctactgtagtaattggaacaagcaaattctatggtggttggcacaacatgttaaaaactgtttatagtgatgtagaaaaccctcaccttatgggttgggattatcctaaatgtgatagagccatgcctaacatgcttagaattatggcctcacttgttcttgctcgcaaacatacaacgtgttgtagcttgtcacaccgtttctatagattagctaatgagtgtgctcaagtattgagtgaaatggtcatgtgtggcggttcactatatgttaaaccaggtggaacctcatcaggagatgccacaactgcttatgctaatagtgtttttaacatttgtcaagctgtcacggccaatgttaatgcacttttatctactgatggtaacaaaattgccgataagtatgtccgcaatttacaacacagactttatgagtgtctctatagaaatagagatgttgacacagactttgtgaatgagttttacgcatatttgcgtaaacatttctcaatgatgatactctctgacgatgctgttgtgtgtttcaatagcacttatgcatctcaaggtctagtggctagcataaagaactttaagtcagttctttattatcaaaacaatgtttttatgtctgaagcaaaatgttggactgagactgaccttactaaaggacctcatgaattttgctctcaacatacaatgctagttaaacagggtgatgattatgtgtaccttccttacccagatccatcaagaatcctaggggccggctgttttgtagatgatatcgtaaaaacagatggtacacttatgattgaacggttcgtgtctttagctatagatgcttacccacttactaaacatcctaatcaggagtatgctgatgtctttcatttgtacttacaatacataagaaagctacatgatgagttaacaggacacatgttagacatgtattctgttatgcttactaatgataacacttcaaggtattgggaacctgagttttatgaggctatgtacacaccgcatacagtcttacaggctgttggggcttgtgttctttgcaattcacagacttcattaagatgtggtgcttgcatacgtagaccattcttatgttgtaaatgctgttacgaccatgtcatatcaacatcacataaattagtcttgtctgttaatccgtatgtttgcaatgctccaggttgtgatgtcacagatgtgactcaactttacttaggaggtatgagctattattgtaaatcacataaaccacccattagttttccattgtgtgctaatggacaagtttttggtttatataaaaatacatgtgttggtagcgataatgttactgactttaatgcaattgcaacatgtgactggacaaatgctggtgattacattttagctaacacctgtactgaaagactcaagctttttgcagcagaaacgctcaaagctactgaggagacatttaaactgtcttatggtattgctactgtacgtgaagtgctgtctgacagagaattacatctttcatgggaagttggtaaacctagaccaccacttaaccgaaattatgtctttactggttatcgtgtaactaaaaacagtaaagtacaaataggagagtacacctttgaaaaaggtgactatggtgatgctgttgtttaccgaggtacaacaacttacaaattaaatgttggtgattattttgtgctgacatcacatacagtaatgccattaagtgcacctacactagtgccacaagagcactatgttagaattactggcttatacccaacactcaatatctcagatgagttttctagcaatgttgcaaattatcaaaaggttggtatgcaaaagtattctacactccagggaccacctggtactggtaagagtcattttgctattggcctagctctctactacccttctgctcgcatagtgtatacagcttgctctcatgccgctgttgatgcactatgtgagaaggcattaaaatatttgcctatagataaatgtagtagaattatacctgcacgtgctcgtgtagagtgttttgataaattcaaagtgaattcaacattagaacagtatgtcttttgtactgtaaatgcattgcctgagacgacagcagatatagttgtctttgatgaaatttcaatggccacaaattatgatttgagtgttgtcaatgccagattacgtgctaagcactatgtgtacattggcgaccctgctcaattacctgcaccacgcacattgctaactaagggcacactagaaccagaatatttcaattcagtgtgtagacttatgaaaactataggtccagacatgttcctcggaacttgtcggcgttgtcctgctgaaattgttgacactgtgagtgctttggtttatgataataagcttaaagcacataaagacaaatcagctcaatgctttaaaatgttttataagggtgttatcacgcatgatgtttcatctgcaattaacaggccacaaataggcgtggtaagagaattccttacacgtaaccctgcttggagaaaagctgtctttatttcaccttataattcacagaatgctgtagcctcaaagattttgggactaccaactcaaactgttgattcatcacagggctcagaatatgactatgtcatattcactcaaaccactgaaacagctcactcttgtaatgtaaacagatttaatgttgctattaccagagcaaaagtaggcatactttgcataatgtctgatagagacctttatgacaagttgcaatttacaagtcttgaaattccacgtaggaatgtggcaactttacaagctgaaaatgtaacaggactctttaaagattgtagtaaggtaatcactgggttacatcctacacaggcacctacacacctcagtgttgacactaaattcaaaactgaaggtttatgtgttgacatacctggcatacctaaggacatgacctatagaagactcatctctatgatgggttttaaaatgaattatcaagttaatggttaccctaacatgtttatcacccgcgaagaagctataagacatgtacgtgcatggattggcttcgatgtcgaggggtgtcatgctactagagaagctgttggtaccaatttacctttacagctaggtttttctacaggtgttaacctagttgctgtacctacaggttatgttgatacacctaataatacagatttttccagagttagtgctaaaccaccgcctggagatcaatttaaacacctcataccacttatgtacaaaggacttccttggaatgtagtgcgtataaagattgtacaaatgttaagtgacacacttaaaaatctctctgacagagtcgtatttgtcttatgggcacatggctttgagttgacatctatgaagtattttgtgaaaataggacctgagcgcacctgttgtctatgtgatagacgtgccacatgcttttccactgcttcagacacttatgcctgttggcatcattctattggatttgattacgtctataatccgtttatgattgatgttcaacaatggggttttacaggtaacctacaaagcaaccatgatctgtattgtcaagtccatggtaatgcacatgtagctagttgtgatgcaatcatgactaggtgtctagctgtccacgagtgctttgttaagcgtgttgactggactattgaatatcctataattggtgatgaactgaagattaatgcggcttgtagaaaggttcaacacatggttgttaaagctgcattattagcagacaaattcccagttcttcacgacattggtaaccctaaagctattaagtgtgtacctcaagctgatgtagaatggaagttctatgatgcacagccttgtagtgacaaagcttataaaatagaagaattattctattcttatgccacacattctgacaaattcacagatggtgtatgcctattttggaattgcaatgtcgatagatatcctgctaattccattgtttgtagatttgacactagagtgctatctaaccttaacttgcctggttgtgatggtggcagtttgtatgtaaataaacatgcattccacacaccagcttttgataaaagtgcttttgttaatttaaaacaattaccatttttctattactctgacagtccatgtgagtctcatggaaaacaagtagtgtcagatatagattatgtaccactaaagtctgctacgtgtataacacgttgcaatttaggtggtgctgtctgtagacatcatgctaatgagtacagattgtatctcgatgcttataacatgatgatctcagctggctttagcttgtgggtttacaaacaatttgatacttataacctctggaacacttttacaagacttcagagtttagaaaatgtggcttttaatgttgtaaataagggacactttgatggacaacagggtgaagtaccagtttctatcattaataacactgtttacacaaaagttgatggtgttgatgtagaattgtttgaaaataaaacaacattacctgttaatgtagcatttgagctttgggctaagcgcaacattaaaccagtaccagaggtgaaaatactcaataatttgggtgtggacattgctgctaatactgtgatctgggactacaaaagagatgctccagcacatatatctactattggtgtttgttctatgactgacatagccaagaaaccaactgaaacgatttgtgcaccactcactgtcttttttgatggtagagttgatggtcaagtagacttatttagaaatgcccgtaatggtgttcttattacagaaggtagtgttaaaggtttacaaccatctgtaggtcccaaacaagctagtcttaatggagtcacattaattggagaagccgtaaaaacacagttcaattattataagaaagttgatggtgttgtccaacaattacctgaaacttactttactcagagtagaaatttacaagaatttaaacccaggagtcaaatggaaattgatttcttagaattagctatggatgaattcattgaacggtataaattagaaggctatgccttcgaacatatcgtttatggagattttagtcatagtcagttaggtggtttacatctactgattggactagctaaacgttttaaggaatcaccttttgaattagaagattttattcctatggacagtacagttaaaaactatttcataacagatgcgcaaacaggttcatctaagtgtgtgtgttctgttattgatttattacttgatgattttgttgaaataataaaatcccaagatttatctgtagtttctaaggttgtcaaagtgactattgactatacagaaatttcatttatgctttggtgtaaagatggccatgtagaaacattttacccaaaattacaatctagtcaagcgtggcaaccgggtgttgctatgcctaatctttacaaaatgcaaagaatgctattagaaaagtgtgaccttcaaaattatggtgatagtgcaacattacctaaaggcataatgatgaatgtcgcaaaatatactcaactgtgtcaatatttaaacacattaacattagctgtaccctataatatgagagttatacattttggtgctggttctgataaaggagttgcaccaggtacagctgttttaagacagtggttgcctacgggtacgctgcttgtcgattcagatcttaatgactttgtctctgatgcagattcaactttgattggtgattgtgcaactgtacatacagctaataaatgggatctcattattagtgatatgtacgaccctaagactaaaaatgttacaaaagaaaatgactctaaagagggttttttcacttacatttgtgggtttatacaacaaaagctagctcttggaggttccgtggctataaagataacagaacattcttggaatgctgatctttataagctcatgggacacttcgcatggtggacagcctttgttactaatgtgaatgcgtcatcatctgaagcatttttaattggatgtaattatcttggcaaaccacgcgaacaaatagatggttatgtcatgcatgcaaattacatattttggaggaatacaaatccaattcagttgtcttcctattctttatttgacatgagtaaatttccccttaaattaaggggtactgctgttatgtctttaaaagaaggtcaaatcaatgatatgattttatctcttcttagtaaaggtagacttataattagagaaaacaacagagttgttatttctagtgatgttcttgttaacaactaaacgaacaatgtttgtttttcttgttttattgccactagtctctagtcagtgtgttaatcttacaaccagaactcaattaccccctgcatacactaattctttcacacgtggtgtttattaccctgacaaagttttcagatcctcagttttacattcaactcaggacttgttcttacctttcttttccaatgttacttggttccatgctatacatgtctctgggaccaatggtactaagaggtttgataaccctgtcctaccatttaatgatggtgtttattttgcttccactgagaagtctaacataataagaggctggatttttggtactactttagattcgaagacccagtccctacttattgttaataacgctactaatgttgttattaaagtctgtgaatttcaattttgtaatgatccatttttgggtgtttattaccacaaaaacaacaaaagttggatggaaagtgagttcagagtttattctagtgcgaataattgcacttttgaatatgtctctcagccttttcttatggaccttgaaggaaaacagggtaatttcaaaaatcttagggaatttgtgtttaagaatattgatggttattttaaaatatattctaagcacacgcctattaatttagtgcgtgatctcccccagggtttttcggctttagaaccattggtagatttgccaataggtattaacatcactaggtttcaaactttacttgctttacatagaagttatttgactcctggtgattcttcttcaggttggacagctggtgctgcagcttattatgtgggttatcttcaacctaggacttttctattaaaatataatgaaaatggaaccattacagatgctgtagactgtgcacttgaccctctctcagaaacaaagtgtacgttgaaatccttcactgtagaaaaaggaatctatcaaacttctaactttagagtccaaccaacagaatctattgttagatttcctaatattacaaacttgtgcccttttggtgaagtttttaacgccaccagatttgcatctgtttatgcttggaacaggaagagaatcagcaactgtgttgctgattattctgtcctatataattccgcatcattttccacttttaagtgttatggagtgtctcctactaaattaaatgatctctgctttactaatgtctatgcagattcatttgtaattagaggtgatgaagtcagacaaatcgctccagggcaaactggaaagattgctgattataattataaattaccagatgattttacaggctgcgttatagcttggaattctaacaatcttgattctaaggttggtggtaattataattacctgtatagattgtttaggaagtctaatctcaaaccttttgagagagatatttcaactgaaatctatcaggccggtagcacaccttgtaatggtgttgaaggttttaattgttactttcctttacaatcatatggtttccaacccactaatggtgttggttaccaaccatacagagtagtagtactttcttttgaacttctacatgcaccagcaactgtttgtggacctaaaaagtctactaatttggttaaaaacaaatgtgtcaatttcaacttcaatggtttaacaggcacaggtgttcttactgagtctaacaaaaagtttctgcctttccaacaatttggcagagacattgctgacactactgatgctgtccgtgatccacagacacttgagattcttgacattacaccatgttcttttggtggtgtcagtgttataacaccaggaacaaatacttctaaccaggttgctgttctttatcaggatgttaactgcacagaagtccctgttgctattcatgcagatcaacttactcctacttggcgtgtttattctacaggttctaatgtttttcaaacacgtgcaggctgtttaataggggctgaacatgtcaacaactcatatgagtgtgacatacccattggtgcaggtatatgcgctagttatcagactcagactaattctcctcggcgggcacgtagtgtagctagtcaatccatcattgcctacactatgtcacttggtgcagaaaattcagttgcttactctaataactctattgccatacccacaaattttactattagtgttaccacagaaattctaccagtgtctatgaccaagacatcagtagattgtacaatgtacatttgtggtgattcaactgaatgcagcaatcttttgttgcaatatggcagtttttgtacacaattaaaccgtgctttaactggaatagctgttgaacaagacaaaaacacccaagaagtttttgcacaagtcaaacaaatttacaaaacaccaccaattaaagattttggtggttttaatttttcacaaatattaccagatccatcaaaaccaagcaagaggtcatttattgaagatctacttttcaacaaagtgacacttgcagatgctggcttcatcaaacaatatggtgattgccttggtgatattgctgctagagacctcatttgtgcacaaaagtttaacggccttactgttttgccacctttgctcacagatgaaatgattgctcaatacacttctgcactgttagcgggtacaatcacttctggttggacctttggtgcaggtgctgcattacaaataccatttgctatgcaaatggcttataggtttaatggtattggagttacacagaatgttctctatgagaaccaaaaattgattgccaaccaatttaatagtgctattggcaaaattcaagactcactttcttccacagcaagtgcacttggaaaacttcaagatgtggtcaaccaaaatgcacaagctttaaacacgcttgttaaacaacttagctccaattttggtgcaatttcaagtgttttaaatgatatcctttcacgtcttgacaaagttgaggctgaagtgcaaattgataggttgatcacaggcagacttcaaagtttgcagacatatgtgactcaacaattaattagagctgcagaaatcagagcttctgctaatcttgctgctactaaaatgtcagagtgtgtacttggacaatcaaaaagagttgatttttgtggaaagggctatcatcttatgtccttccctcagtcagcacctcatggtgtagtcttcttgcatgtgacttatgtccctgcacaagaaaagaacttcacaactgctcctgccatttgtcatgatggaaaagcacactttcctcgtgaaggtgtctttgtttcaaatggcacacactggtttgtaacacaaaggaatttttatgaaccacaaatcattactacagacaacacatttgtgtctggtaactgtgatgttgtaataggaattgtcaacaacacagtttatgatcctttgcaacctgaattagactcattcaaggaggagttagataaatattttaagaatcatacatcaccagatgttgatttaggtgacatctctggcattaatgcttcagttgtaaacattcaaaaagaaattgaccgcctcaatgaggttgccaagaatttaaatgaatctctcatcgatctccaagaacttggaaagtatgagcagtatataaaatggccatggtacatttggctaggttttatagctggcttgattgccatagtaatggtgacaattatgctttgctgtatgaccagttgctgtagttgtctcaagggctgttgttcttgtggatcctgctgcaaatttgatgaagacgactctgagccagtgctcaaaggagtcaaattacattacacataaacgaacttatggatttgtttatgagaatcttcacaattggaactgtaactttgaagcaaggtgaaatcaaggatgctactccttcagattttgttcgcgctactgcaacgataccgatacaagcctcactccctttcggatggcttattgttggcgttgcacttcttgctgtttttcagagcgcttccaaaatcataaccctcaaaaagagatggcaactagcactctccaagggtgttcactttgtttgcaacttgctgttgttgtttgtaacagtttactcacaccttttgctcgttgctgctggccttgaagccccttttctctatctttatgctttagtctacttcttgcagagtataaactttgtaagaataataatgaggctttggctttgctggaaatgccgttccaaaaacccattactttatgatgccaactattttctttgctggcatactaattgttacgactattgtataccttacaatagtgtaacttcttcaattgtcattacttcaggtgatggcacaacaagtcctatttctgaacatgactaccagattggtggttatactgaaaaatgggaatctggagtaaaagactgtgttgtattacacagttacttcacttcagactattaccagctgtactcaactcaattgagtacagacactggtgttgaacatgttaccttcttcatctacaataaaattgttgatgagcctgaagaacatgtccaaattcacacaatcgacggttcatccggagttgttaatccagtaatggaaccaatttatgatgaaccgacgacgactactagcgtgcctttgtaagcacaagctgatgagtacgaacttatgtactcattcgtttcggaagagacaggtacgttaatagttaatagcgtacttctttttcttgctttcgtggtattcttgctagttacactagccatccttactgcgcttcgattgtgtgcgtactgctgcaatattgttaacgtgagtcttgtaaaaccttctttttacgtttactctcgtgttaaaaatctgaattcttctagagttcctgatcttctggtctaaacgaactaaatattatattagtttttctgtttggaactttaattttagccatggcagattccaacggtactattaccgttgaagagcttaaaaagctccttgaacaatggaacctagtaataggtttcctattccttacatggatttgtcttctacaatttgcctatgccaacaggaataggtttttgtatataattaagttaattttcctctggctgttatggccagtaactttagcttgttttgtgcttgctgctgtttacagaataaattggatcaccggtggaattgctatcgcaatggcttgtcttgtaggcttgatgtggctcagctacttcattgcttctttcagactgtttgcgcgtacgcgatccatgtggtcattcaatccagaaactaacattcttctcaacgtgccactccatggcactattctgaccagaccgcttctagaaagtgaactcgtaatcggagctgtgatccttcgtggacatcttcgtattgctggacaccatctaggacgctgtgacatcaaggacctgcctaaagaaatcactgttgctacatcacgaacgctttcttattacaaattgggagcttcgcagcgtgtagcaggtgactcaggttttgctgcatacagtcgctacaggattggcaactataaattaaacacagaccattccagtagcagtgacaatattgctttgcttgtacagtaagtgacaacagatgtttcatctcgttgactttcaggttactatagcagagatattactaattattatgaggacttttaaagtttccatttggaatcttgattacatcataaacctcataattaaaaatttatctaagtcactaactgagaataaatattctcaattagatgaagagcaaccaatggagattgattaaacgaacatgaaaattattcttttcttggcactgataacactcgctacttgtgagctttatcactaccaagagtgtgttagaggtacaacagtacttttaaaagaaccttgctcttctggaacatacgagggcaattcaccatttcatcctctagctgataacaaatttgcactgacttgctttagcactcaatttgcttttgcttgtcctgacggcgtaaaacacgtctatcagttacgtgccagatcagtttcacctaaactgttcatcagacaagaggaagttcaagaactttactctccaatttttcttattgttgcggcaatagtgtttataacactttgcttcacactcaaaagaaagacagaatgattgaactttcattaattgacttctatttgtgctttttagcctttctgctattccttgttttaattatgcttattatcttttggttctcacttgaactgcaagatcataatgaaacttgtcacgcctaaacgaacatgaaatttcttgttttcttaggaatcatcacaactgtagctgcatttcaccaagaatgtagtttacagtcatgtactcaacatcaaccatatgtagttgatgacccgtgtcctattcacttctattctaaatggtatattagagtaggagctagaaaatcagcacctttaattgaattgtgcgtggatgaggctggttctaaatcacccattcagtacatcgatatcggtaattatacagtttcctgtttaccttttacaattaattgccaggaacctaaattgggtagtcttgtagtgcgttgttcgttctatgaagactttttagagtatcatgacgttcgtgttgttttagatttcatctaaacgaacaaactaaaatgtctgataatggaccccaaaatcagcgaaatgcaccccgcattacgtttggtggaccctcagattcaactggcagtaaccagaatggagaacgcagtggggcgcgatcaaaacaacgtcggccccaaggtttacccaataatactgcgtcttggttcaccgctctcactcaacatggcaaggaagaccttaaattccctcgaggacaaggcgttccaattaacaccaatagcagtccagatgaccaaattggctactaccgaagagctaccagacgaattcgtggtggtgacggtaaaatgaaagatctcagtccaagatggtatttctactacctaggaactgggccagaagctggacttccctatggtgctaacaaagacggcatcatatgggttgcaactgagggagccttgaatacaccaaaagatcacattggcacccgcaatcctgctaacaatgctgcaatcgtgctacaacttcctcaaggaacaacattgccaaaaggcttctacgcagaagggagcagaggcggcagtcaagcctcttctcgttcctcatcacgtagtcgcaacagttcaagaaattcaactccaggcagcagtaggggaacttctcctgctagaatggctggcaatggcggtgatgctgctcttgctttgctgctgcttgacagattgaaccagcttgagagcaaaatgtctggtaaaggccaacaacaacaaggccaaactgtcactaagaaatctgctgctgaggcttctaagaagcctcggcaaaaacgtactgccactaaagcatacaatgtaacacaagctttcggcagacgtggtccagaacaaacccaaggaaattttggggaccaggaactaatcagacaaggaactgattacaaacattggccgcaaattgcacaatttgcccccagcgcttcagcgttcttcggaatgtcgcgcattggcatggaagtcacaccttcgggaacgtggttgacctacacaggtgccatcaaattggatgacaaagatccaaatttcaaagatcaagtcattttgctgaataagcatattgacgcatacaaaacattcccaccaacagagcctaaaaaggacaaaaagaagaaggctgatgaaactcaagccttaccgcagagacagaagaaacagcaaactgtgactcttcttcctgctgcagatttggatgatttctccaaacaattgcaacaatccatgagcagtgctgactcaactcaggcctaaactcatgcagaccacacaaggcagatgggctatataaacgttttcgcttttccgtttacgatatatagtctactcttgtgcagaatgaattctcgtaactacatagcacaagtagatgtagttaactttaatctcacatagcaatctttaatcagtgtgtaacattagggaggacttgaaagagccaccacattttcaccgaggccacgcggagtacgatcgagtgtacagtgaacaatgctagggagagctgcctatatggaagagccctaatgtgtaaaattaattttagtagtgctatccccatgtgattttaatagcttcttaggagaatgacaaaaaaaaaaaaaaaaaaaaaaaaaaaaaaaaaaaaaaaaaaaaaaaaaaaaaaaaaaagggtcggcatggcatctccacctcctcgcggtccgacctgggcatccgaaggaggacgcacgtccactcggatggctaagggagcagcacactggcggccgttactagggccgcgcccttcccaacagttgcgcagcctgaatggcgaatggagatccaatttttaagtgtataatgtgttaaactactgattctaattgtttgtgtattttagattcacagtcccaaggctcatttcaggcccctcagtcctcacagtctgttcatgatcataatcagccataccacatttgtagaggttttacttgctttaaaaaacctcccacacctccccctgaacctgaaacataaaatgaatgcaattgttgttgttaacttgtttattgcagcttataatggttacaaataaagcaatagcatcacaaatttcacaaataaagcatttttttcactgcattctagttgtggtttgtccaaactcatcaatgtatcttaaagcttgagtattctatagtctcacctaaatagcttggcgtaatcatggtcatagctgtttcctgtgtgaaattgttatccgctcacaattccacacaacatacgagccggaagcataaagtgtaaagcctggggtgcctaatgagtgagctaactcacattaattgcgttgcgctcactgcccgctttccagtcgggaaacctgtcgtgccagctgcattaatgaatcggccaacgcgaaccccttgcggccgcccgggccgtcgaccaattctcatgtttgacagcttatcatcgaatttctgccattcatccgcttattatcacttattcaggcgtagcaaccaggcgtttaagggcaccaataactgccttaaaaaaattacgccccgccctgccactcatcgcagtactgttgtaattcattaagcattctgccgacatggaagccatcacaaacggcatgatgaacctgaatcgccagcggcatcagcaccttgtcgccttgcgtataatatttgcccatggtgaaaacgggggcgaagaagttgtccatattggccacgtttaaatcaaaactggtgaaactcacccagggattggctgagacgaaaaacatattctcaataaaccctttagggaaataggccaggttttcaccgtaacacgccacatcttgcgaatatatgtgtagaaactgccggaaatcgtcgtggtattcactccagagcgatgaaaacgtttcagtttgctcatggaaaacggtgtaacaagggtgaacactatcccatatcaccagctcaccgtctttcattgccatacgaaattccggatgagcattcatcaggcgggcaagaatgtgaataaaggccggataaaacttgtgcttatttttctttacggtctttaaaaaggccgtaatatccagctgaacggtctggttataggtacattgagcaactgactgaaatgcctcaaaatgttctttacgatgccattgggatatatcaacggtggtatatccagtgatttttttctccattttagcttccttagctcctgaaaatctcgataactcaaaaaatacgcccggtagtgatcttatttcattatggtgaaagttggaacctcttacgtgccgatcaacgtctcattttcgccaaaagttggcccagggcttcccggtatcaacagggacaccaggatttatttattctgcgaagtgatcttccgtcacaggtatttattcgcgataagctcatggagcggcgtaaccgtcgcacaggaaggacagagaaagcgcggatctgggaagtgacggacagaacggtcaggacctggattggggaggcggttgccgccgctgctgctgacggtgtgacgttctctgttccggtcacaccacatacgttccgccattcctatgcgatgcacatgctgtatgccggtataccgctgaaagttctgcaaagcctgatgggacataagtccatcagttcaacggaagtctacacgaaggtttttgcgctggatgtggctgcccggcaccgggtgcagtttgcgatgccggagtctgatgcggttgcgatgctgaaacaattatcctgagaataaatgccttggcctttatatggaaatgtggaactgagtggatatgctgtttttgtctgttaaacagagaagctggctgttatccactgagaagcgaacgaaacagtcgggaaaatctcccattatcgtagagatccgcattattaatctcaggagcctgtgtagcgtttataggaagtagtgttctgtcatgatgcctgcaagcggtaacgaaaacgatttgaatatgccttcaggaacaatagaaatcttcgtgcggtgttacgttgaagtggagcggattatgtcagcaatggacagaacaacctaatgaacacagaaccatgatgtggtctgtccttttacagccagtagtgctcgccgcagtcgagcgacagggcgaagccctcggctggttgccctcgccgctgggctggcggccgtctatggccctgcaaacgcgccagaaacgccgtcgaagccgtgtgcgagacaccgcggccggccgccggcgttgtggatacctcgcggaaaacttggccctcactgacagatgaggggcggacgttgacacttgaggggccgactcacccggcgcggcgttgacagatgaggggcaggctcgatttcggccggcgacgtggagctggccagcctcgcaaatcggcgaaaacgcctgattttacgcgagtttcccacagatgatgtggacaagcctggggataagtgccctgcggtattgacacttgaggggcgcgactactgacagatgaggggcgcgatccttgacacttgaggggcagagtgctgacagatgaggggcgcacctattgacatttgaggggctgtccacaggcagaaaatccagcatttgcaagggtttccgcccgtttttcggccaccgctaacctgtcttttaacctgcttttaaaccaatatttataaaccttgtttttaaccagggctgcgccctgtgcgcgtgaccgcgcacgccgaaggggggtgcccccccttctcgaaccctcccggtcgagtgagcgaggaagcaccagggaacagcacttatatattctgcttacacacgatgcctgaaaaaacttcccttggggttatccacttatccacggggatatttttataattattttttttatagtttttagatcttcttttttagagcgccttgtaggcctttatccatgctggttctagagaaggtgttgtgacaaattgccctttcagtgtgacaaatcaccctcaaatgacagtcctgtctgtgacaaattgcccttaaccctgtgacaaattgccctcagaagaagctgttttttcacaaagttatccctgcttattgactcttttttatttagtgtgacaatctaaaaacttgtcacacttcacatggatctgtcatggcggaaacagcggttatcaatcacaagaaacgtaaaaatagcccgcgaatcgtccagtcaaacgacctcactgaggcggcatatagtctctcccgggatcaaaaacgtatgctgtatctgttcgttgaccagatcagaaaatctgatggcaccctacaggaacatgacggtatctgcgagatccatgttgctaaatatgctgaaatattcggattgacctctgcggaagccagtaaggatatacggcaggcattgaagagtttcgcggggaaggaagtggttttttatcgccctgaagaggatgccggcgatgaaaaaggctatgaatcttttccttggtttatcaaacgtgcgcacagtccatccagagggctttacagtgtacatatcaacccatatctcattcccttctttatcgggttacagaaccggtttacgcagtttcggcttagtgaaacaaaagaaatcaccaatccgtatgccatgcgtttatacgaatccctgtgtcagtatcgtaagccggatggctcaggcatcgtctctctgaaaatcgactggatcatagagcgttaccagctgcctcaaagttaccagcgtatgcctgacttccgccgccgcttcctgcaggtctgtgttaatgagatcaacagcagaactccaatgcgcctctcatacattgagaaaaagaaaggccgccagacgactcatatcgtattttccttccgcgatatcacttccatgacgacaggatagtctgagggttatctgtcacagatttgagggtggttcgtcacatttgttctgacctactgagggtaatttgtcacagttttgctgtttccttcagcctgcatggattttctcatactttttgaactgtaatttttaaggaagccaaatttgagggcagtttgtcacagttgatttccttctctttcccttcgtcatgtgacctgatatcgggggttagttcgtcatcattgatgagggttgattatcacagtttattactctgaattggctatccgcgtgtgtacctctacctggagtttttcccacggtggatatttcttcttgcgctgagcgtaagagctatctgacagaacagttcttctttgcttcctcgccagttcgctcgctatgctcggttacacggctgcggcg

SEQ ID NO: 23 - DNA, 35283 bp, Artificial Sequence
  Clone pCCI-4K-SARS-CoV-2-WDWWW. Based on SARS-CoV-2.
gatgtgctgcaaggcgattaagttgggtaacgccagggttttcccagtcacgacgttgtaaaacgacggccagtgaattgtaatacgactcactatagggcgaattctagttattaatagtaatcaattacggggtcattagttcatagcccatatatggagttccgcgttacataacttacggtaaatggcccgcctggctgaccgcccaacgacccccgcccattgacgtcaataatgacgtatgttcccatagtaacgccaatagggactttccattgacgtcaatgggtggagtatttacggtaaactgcccacttggcagtacatcaagtgtatcatatgccaagtacgccccctattgacgtcaatgacggtaaatggcccgcctggcattatgcccagtacatgaccttatgggactttcctacttggcagtacatctacgtattagtcatcgctattaccatggtgatgcggttttggcagtacatcaatgggcgtggatagcggtttgactcacggggatttccaagtctccaccccattgacgtcaatgggagtttgttttggcaccaaaatcaacgggactttccaaaatgtcgtaacaactccgccccattgacgcaaatgggcggtaggcgtgtacggtgggaggtctatataagcagagctggtttagtgaaccgtattaaaggtttataccttcccaggtaacaaaccaaccaactttcgatctcttgtagatctgttctctaaacgaactttaaaatctgtgtggctgtcactcggctgcatgcttagtgcactcacgcagtataattaataactaattactgtcgttgacaggacacgagtaactcgtctatcttctgcaggctgcttacggtttcgtccgtgttgcagccgatcatcagcacatctaggtttcgtccgggtgtgaccgaaaggtaagatggagagccttgtccctggtttcaacgagaaaacacacgtccaactcagtttgcctgttttacaggttcgcgacgtgctcgtacgtggctttggagactccgtggaggaggtcttatcagaggcacgtcaacatcttaaagatggcacttgtggcttagtagaagttgaaaaaggcgttttgcctcaacttgaacagccctatgtgttcatcaaacgttcggatgctcgaactgcacctcatggtcatgttatggttgagctggtagcagaactcgaaggcattcagtacggtcgtagtggtgagacacttggtgtccttgtccctcatgtgggcgaaataccagtggcttaccgcaaggttcttcttcgtaagaacggtaataaaggagctggtggccatagttacggcgccgatctaaagtcatttgacttaggcgacgagcttggcactgatccttatgaagattttcaagaaaactggaacactaaacatagcagtggtgttacccgtgaactcatgcgtgagcttaacggaggggcatacactcgctatgtcgataacaacttctgtggccctgatggctaccctcttgagtgcattaaagaccttctagcacgtgctggtaaagcttcatgcactttgtccgaacaactggactttattgacactaagaggggtgtatactgctgccgtgaacatgagcatgaaattgcttggtacacggaacgttctgaaaagagctatgaattgcagacaccttttgaaattaaattggcaaagaaatttgacaccttcaatggggaatgtccaaattttgtatttcccttaaattccataatcaagactattcaaccaagggttgaaaagaaaaagcttgatggctttatgggtagaattcgatctgtctatccagttgcgtcaccaaatgaatgcaaccaaatgtgcctttcaactctcatgaagtgtgatcattgtggtgaaacttcatggcagacgggcgattttgttaaagccacttgcgaattttgtggcactgagaatttgactaaagaaggtgccactacttgtggttacttaccccaaaatgctgttgttaaaatttattgtccagcatgtcacaattcagaagtaggacctgagcatagtcttgccgaataccataatgaatctggcttgaaaaccattcttcgtaagggtggtcgcactattgcctttggaggctgtgtgttctcttatgttggttgccataacaagtgtgcctattgggtcccacgtgctagcgctaacataggttgtaaccatacaggtgttgttggagaaggttccgaaggtcttaatgacaaccttcttgaaatactccaaaaagagaaagtcaacatcaatattgttggtgactttaaacttaatgaagagatcgccattattttggcatctttttctgcttccacaagtgcttttgtggaaactgtgaaaggtttggattataaagcattcaaacaaattgttgaatcctgtggtaattttaaagttacaaaaggaaaagctaaaaaaggtgcctggaatattggtgaacagaaatcaatactgagtcctctttatgcatttgcatcagaggctgctcgtgttgtacgatcaattttctcccgcactcttgaaactgctcaaaattctgtgcgtgttttacagaaggccgctataacaatactagatggaatttcacagtattcactgagactcattgatgctatgatgttcacatctgatttggctactaacaatctagttgtaatggcctacattacaggtggtgttgttcagttgacttcgcagtggctaactaacatctttggcactgtttatgaaaaactcaaacccgtccttgattggcttgaagagaagtttaaggaaggtgtagagtttcttagagacggttgggaaattgttaaatttatctcaacctgtgcttgtgaaattgtcggtggacaaattgtcacctgtgcaaaggaaattaaggagagtgttcagacattctttaagcttgtaaataaatttttggctttgtgtgctgactctatcattattggtggagctaaacttaaagccttgaatttaggtgaaacatttgtcacgcactcaaagggattgtacagaaagtgtgttaaatccagagaagaaactggcctactcatgcctctaaaagccccaaaagaaattatcttcttagagggagaaacacttcccacagaagtgttaacagaggaagttgtcttgaaaactggtgatttacaaccattagaacaacctactagtgaagctgttgaagctccattggttggtacaccagtttgtattaacgggcttatgttgctcgaaatcaaagacacagaaaagtactgtgcccttgcacctaatatgatggtaacaaacaataccttcacactcaaaggcggtgcaccaacaaaggttacttttggtgatgacactgtgatagaagtgcaaggttacaagagtgtgaatatcacttttgaacttgatgaaaggattgataaagtacttaatgagaagtgctctgcctatacagttgaactcggtacagaagtaaatgagttcgcctgtgttgtggcagatgctgtcataaaaactttgcaaccagtatctgaattacttacaccactgggcattgatttagatgagtggagtatggctacatactacttatttgatgagtctggtgagtttaaattggcttcacatatgtattgttctttctaccctccagatgaggatgaagaagaaggtgattgtgaagaagaagagtttgagccatcaactcaatatgagtatggtactgaagatgattaccaaggtaaacctttggaatttggtgccacttctgctgctcttcaacctgaagaagagcaagaagaagattggttagatgatgatagtcaacaaactgttggtcaacaagacggcagtgaggacaatcagacaactactattcaaacaattgttgaggttcaacctcaattagagatggaacttacaccagttgttcagactattgaagtgaatagttttagtggttatttaaaacttactgacaatgtatacattaaaaatgcagacattgtggaagaagctaaaaaggtaaaaccaacagtggttgttaatgcagccaatgtttaccttaaacatggaggaggtgttgcaggagccttaaataaggctactaacaatgccatgcaagttgaatctgatgattacatagctactaatggaccacttaaagtgggtggtagttgtgttttaagcggacacaatcttgctaaacactgtcttcatgttgtcggcccaaatgttaacaaaggtgaagacattcaacttcttaagagtgcttatgaaaattttaatcagcacgaagttctacttgcaccattattatcagctggtatttttggtgctgaccctatacattctttaagagtttgtgtagatactgttcgcacaaatgtctacttagctgtctttgataaaaatctctatgacaaacttgtttcaagctttttggaaatgaagagtgaaaagcaagttgaacaaaagatcgctgagattcctaaagaggaagttaagccatttataactgaaagtaaaccttcagttgaacagagaaaacaagatgataagaaaatcaaagcttgtgttgaagaagttacaacaactctggaagaaactaagttcctcacagaaaacttgttactttatattgacattaatggcaatcttcatccagattctgccactcttgttagtgacattgacatcactttcttaaagaaagatgctccatatatagtgggtgatgttgttcaagagggtgttttaactgctgtggttatacctactaaaaaggctggtggcactactgaaatgctagcgaaagctttgagaaaagtgccaacagacaattatataaccacttacccgggtcaaggtttaaatggttatacggtagaagaagcgaaaacggtactaaaaaaatgtaaatcggcgttttatatactaccgtcgataatatcgaatgaaaaacaagaaatactaggtacggtatcgtggaatttacgtgaaatgctagcgcatgcggaagaaacacgtaaattaatgccggtatgtgtagaaacgaaagcgatagtatcgacgatacaacgtaaatataaaggtataaaaatacaagaaggtgtagtagattatggtgcgcgtttttatttttatacgtcgaaaacgacggtagcgtcgctaataaatacgctaaatgatctaaatgaaacgctagtaacgatgccgctaggttatgtaacgcatggtttaaatttagaagaagcggcgcgttatatgcgttcgctaaaagtaccggcgacggtatcggtatcgtcgccggatgcggtaacggcgtataatggttatctaacgtcgtcgtcgaaaacgccggaagaacattttatagaaacgatatcgctagcgggttcgtataaagattggtcgtattcgggtcaatcgacgcaactaggtatagaatttctaaaacgtggtgataaatcggtatattatacgtcgaatccgacgacgtttcatctagatggtgaagtaataacgtttgataatctaaaaacgctactatcgttacgtgaagtacgtacgataaaagtatttacgacggtagataatataaatctacatacgcaagtagtagatatgtcgatgacatatggacaacaatttggtccgacgtatttagatggtgcggatgttacgaaaataaaaccgcataattcgcatgaaggtaaaacgttttatgtattaccgaatgatgatacgctacgtgtagaagcgtttgaatattatcatacgactgatccgtcgtttctaggtcgttatatgtcggcgttaaatcatacgaaaaaatggaaatatccgcaagtaaatggtttaacgtcgataaaatgggcggataataattgttatctagcgacggcgttattaacgctacaacaaatagaattaaaatttaatccgccggcgctacaagatgcgtattatcgtgcgcgtgcgggtgaagcggcgaatttttgtgcgctaatattagcgtattgtaataaaacggtaggtgaattaggtgatgtacgtgaaacgatgtcgtatttatttcaacatgcgaatttagattcgtgtaaacgtgtattaaatgtagtatgtaaaacgtgtggtcaacaacaaacgacgctaaaaggtgtagaagcggtaatgtatatgggtacgctatcgtatgaacaatttaaaaaaggtgtacaaataccgtgtacgtgtggtaaacaagcgacgaaatatctagtacaacaagaatcgccgtttgtaatgatgtcggcgccgccggcgcaatatgaactaaaacatggtacgtttacgtgtgcgtcggaatatacgggtaattatcaatgtggtcattataaacatataacgtcgaaagaaacgttatattgtatagatggtgcgttacttacgaaatcgtcggaatataaaggtccgataacggatgtattttataaagaaaattcgtatacgacgacgataaaaccggtaacgtataaattagatggtgtagtatgtacggaaatagatccgaaattagataattattataaaaaagataattcgtattttacggaacaaccgatagatctagtaccgaatcaaccatatccgaatgcgtcgtttgataattttaaatttgtatgtgataatataaaatttgcggatgatttaaatcaattaacgggttataaaaaaccggcgtcgcgtgaactaaaagtaacgttttttccggatttaaatggtgatgtagtagcgatagattataaacattatacgccgtcgtttaaaaaaggtgcgaaattattacataaaccgatagtatggcatgtaaataatgcgacgaataaagcgacgtataaaccgaatacgtggtgtatacggtgtctatggagcacgaaaccggtagaaacgtcgaattcgtttgatgtactaaaatcggaagatgcgcaaggtatggataatctagcgtgtgaagatctaaaaccggtatcggaagaagtagtagaaaatccgacgatacaaaaagatgtactggaatgtaatgtaaaaacgacggaagtagtaggtgatataatactaaaaccggctaataattcgttaaaaataacggaagaagtaggtcatacggatctaatggcggcgtatgtagataattcgtcgctaacgataaaaaaaccgaatgaattatcgcgtgtattaggtttaaaaacgctagcgacgcatggtttagctgctgtaaattcggtaccgtgggatacgatagcgaattatgcgaaaccgtttctaaataaagtagtatcgacgacgacgaatatagtaacgcgatgtttaaatcgtgtatgtacgaattatatgccgtatttttttacgttattactacaattatgtacgtttacgcgatcgacgaattcgcgtataaaagcgtcgatgccgacgacgatagcgaaaaatacggtaaaatcggtaggtaaattttgtctagaagcgtcgtttaattatttaaaatcgccgaatttttctaaactaataaatataataatatggtttttactattatcggtatgcctaggttctttaatctactcaaccgctgctttaggtgttttaatgtctaatttaggcatgccttcttactgtactggttacagagaaggctatttgaactctactaatgtcactattgcaacctactgtactggttctataccttgtagtgtttgtcttagtggtttagattctttagacacctatccttctttagaaactatacaaattaccatttcatcttttaaatgggatttaactgcttttggcttagttgcagagtggtttttggcatatattcttttcactaggtttttctatgtacttggattggctgcaatcatgcaattgtttttcagctattttgcagtacattttattagtaattcttggcttatgtggttaataattaatcttgtacaaatggccccgatttcagctatggttagaatgtacatcttctttgcatcattttattatgtatggaaaagttatgtgcatgttgtagacggttgtaattcatcaacttgtatgatgtgttacaaacgtaatagagcaacaagagtcgaatgtacaactattgttaatggtgttagaaggtccttttatgtctatgctaatggaggtaaaggcttttgcaaactacacaattggaattgtgttaattgtgatacattctgtgctggtagtacatttattagtgatgaagttgcgagagacttgtcactacagtttaaaagaccaataaatcctactgaccagtcttcttacatcgttgatagtgttacagtgaagaatggttccatccatctttactttgataaagctggtcaaaagacttatgaaagacattctctctctcattttgttaacttagacaacctgagagctaataacactaaaggttcattgcctattaatgttatagtttttgatggtaaatcaaaatgtgaagaatcatctgcaaaatcagcgtctgtttactacagtcagcttatgtgtcaacctatactgttactagatcaggcattagtgtctgatgttggtgatagtgcggaagttgcagttaaaatgtttgatgcttacgttaatacgttttcatcaacttttaacgtaccaatggaaaaactcaaaacactagttgcaactgcagaagctgaacttgcaaagaatgtgtccttagacaatgtcttatctacttttatttcagcagctcggcaagggtttgttgattcagatgtagaaactaaagatgttgttgaatgtcttaaattgtcacatcaatctgacatagaagttactggcgatagttgtaataactatatgctcacctataacaaagttgaaaacatgacaccccgtgaccttggtgcttgtattgactgtagtgcgcgtcatattaatgcgcaggtagcaaaaagtcacaacattgctttgatatggaacgttaaagatttcatgtcattgtctgaacaactacgaaaacaaatacgtagtgctgctaaaaagaataacttaccttttaagttgacatgtgcaactactagacaagttgttaatgttgtaacaacaaagatagcacttaagggtggtaaaattgttaataattggttgaagcagttaattaaagttacacttgtgttcctttttgttgctgctattttctatttaataacacctgttcatgtcatgtctaaacatactgacttttcaagtgaaatcataggatacaaggctattgatggtggtgtcactcgtgacatagcatctacagatacttgttttgctaacaaacatgctgattttgacacatggtttagccagcgtggtggtagttatactaatgacaaagcttgcccattgattgctgcagtcataacaagagaagtgggttttgtcgtgcctggtttgcctggcacgatattacgcacaactaatggtgactttttgcatttcttacctagagtttttagtgcagttggtaacatctgttacacaccatcaaaacttatagagtacactgactttgcaacatcagcttgtgttttggctgctgaatgtacaatttttaaagatgcttctggtaagccagtaccatattgttatgataccaatgtactagaaggttctgttgcttatgaaagtttacgccctgacacacgttatgtgctcatggatggctctattattcaatttcctaacacctaccttgaaggttctgttagagtggtaacaacttttgattctgagtactgtaggcacggcacttgtgaaagatcagaagctggtgtttgtgtatctactagtggtagatgggtacttaacaatgattattacagatctttaccaggagttttctgtggtgtagatgctgtaaatttacttactaatatgtttacaccactaattcaacctattggtgctttggacatatcagcatctatagtagctggtggtattgtagctatcgtagtaacatgccttgcctactattttatgaggtttagaagagcttttggtgaatacagtcatgtagttgcctttaatactttactattccttatgtcattcactgtactctgtttaacaccagtttactcattcttacctggtgtttattctgttatttacttgtacttgacattttatcttactaatgatgtttcttttttagcacatattcagtggatggttatgttcacacctttagtacctttctggataacaattgcttatatcatttgtatttccacaaagcatttctattggttctttagtaattacctaaagagacgtgtagtctttaatggtgtttcctttagtacttttgaagaagctgcgctgtgcacctttttgttaaataaagaaatgtatctaaagttgcgtagtgatgtgctattacctcttacgcaatataatagatacttagctctttataataagtacaagtattttagtggagcaatggatacaactagctacagagaagctgcttgttgtcatctcgcaaaggctctcaatgacttcagtaactcaggttctgatgttctttaccaaccaccacaaacctctatcacctcagctgttttgcagagtggttttagaaaaatggcattcccatctggtaaagttgagggttgtatggtacaagtaacttgtggtacaactacacttaacggtctttggcttgatgacgtagtttactgtccaagacatgtgatctgcacctctgaagacatgcttaaccctaattatgaagatttactcattcgtaagtctaatcataatttcttggtacaggctggtaatgttcaactcagggttattggacattctatgcaaaattgtgtacttaagcttaaggttgatacagccaatcctaagacacctaagtataagtttgttcgcattcaaccaggacagactttttcagtgttagcttgttacaatggttcaccatctggtgtttaccaatgtgctatgaggcccaatttcactattaagggttcattccttaatggttcatgtggtagtgttggttttaacatagattatgactgtgtctctttttgttacatgcaccatatggaattaccaactggagttcatgctggcacagacttagaaggtaacttttatggaccttttgttgacaggcaaacagcacaagcagctggtacggacacaactattacagttaatgttttagcttggttgtacgctgctgttataaatggagacaggtggtttctcaatcgatttaccacaactcttaatgactttaaccttgtggctatgaagtacaattatgaacctctaacacaagaccatgttgacatactaggacctctttctgctcaaactggaattgccgttttagatatgtgtgcttcattaaaagaattactgcaaaatggtatgaatggacgtaccatattgggtagtgctttattagaagatgaatttacaccttttgatgttgttagacaatgctcaggtgttactttccaaagtgcagtgaaaagaacaatcaagggtacacaccactggttgttactcacaattttgacttcacttttagttttagtccagagtactcaatggtctttgttcttttttttgtatgaaaatgcctttttaccttttgctatgggtattattgctatgtctgcttttgcaatgatgtttgtcaaacataagcatgcatttctctgtttgtttttgttaccttctcttgccactgtagcttattttaatatggtctatatgcctgctagttgggtgatgcgtattatgacatggttggatatggttgatactagtttgtctggttttaagctaaaagactgtgttatgtatgcatcagctgtagtgttactaatccttatgacagcaagaactgtgtatgatgatggtgctaggagagtgtggacacttatgaatgtcttgacactcgtttataaagtttattatggtaatgctttagatcaagccatttccatgtgggctcttataatctctgttacttctaactactcaggtgtagttacaactgtcatgtttttggccagaggtattgtttttatgtgtgttgagtattgccctattttcttcataactggtaatacacttcagtgtataatgctagtttattgtttcttaggctatttttgtacttgttactttggcctcttttgtttactcaaccgctactttagactgactcttggtgtttatgattacttagtttctacacaggagtttagatatatgaattcacagggactactcccacccaagaatagcatagatgccttcaaactcaacattaaattgttgggtgttggtggcaaaccttgtatcaaagtagccactgtacagtctaaaatgtcagatgtaaagtgcacatcagtagtcttactctcagttttgcaacaactcagagtagaatcatcatctaaattgtgggctcaatgtgtccagttacacaatgacattctcttagctaaagatactactgaagcctttgaaaaaatggtttcactactttctgttttgctttccatgcagggtgctgtagacataaacaagctttgtgaagaaatgctggacaacagggcaaccttacaagctatagcctcagagtttagttcccttccatcatatgcagcttttgctactgctcaagaagcttatgagcaggctgttgctaatggtgattctgaagttgttcttaaaaagttgaagaagtctttgaatgtggctaaatctgaatttgaccgtgatgcagccatgcaacgtaagttggaaaagatggctgatcaagctatgacccaaatgtataaacaggctagatctgaggacaagagggcaaaagttactagtgctatgcagacaatgcttttcactatgcttagaaagttggataatgatgcactcaacaacattatcaacaatgcaagagatggttgtgttcccttgaacataatacctcttacaacagcagccaaactaatggttgtcataccagactataacacatataaaaatacgtgtgatggtacaacatttacttatgcatcagcattgtgggaaatccaacaggttgtagatgcagatagtaaaattgttcaacttagtgaaattagtatggacaattcacctaatttagcatggcctcttattgtaacagctttaagggccaattctgctgtcaaattacagaataatgagcttagtcctgttgcactacgacagatgtcttgtgctgccggtactacacaaactgcttgcactgatgacaatgcgttagcttactacaacacaacaaagggaggtaggtttgtacttgcactgttatccgatttacaggatttgaaatgggctagattccctaagagtgatggaactggtactatctatacagaactggaaccaccttgtaggtttgttacagacacacctaaaggtcctaaagtgaagtatttatactttattaaaggattaaacaacctaaatagaggtatggtacttggtagtttagctgccacagtacgtctacaagctggtaatgcaacagaagtgcctgccaattcaactgtattatctttctgtgcttttgctgtagatgctgctaaagcttacaaagattatctagctagtgggggacaaccaatcactaattgtgttaagatgttgtgtacacacactggtactggtcaggcaataacagttacaccggaagccaatatggatcaagaatcctttggtggtgcatcgtgttgtctgtactgccgttgccacatagatcatccaaatcctaaaggattttgtgacttaaaaggtaagtatgtacaaatacctacaacttgtgctaatgaccctgtgggttttacacttaaaaacacagtctgtaccgtctgcggtatgtggaaaggttatggctgtagttgtgatcaactccgcgaacccatgcttcagtcagctgatgcacaatcgtttttaaacgggtttgcggtgtaagtgcagcccgtcttacaccgtgcggcacaggcactagtactgatgtcgtatacagggcttttgacatctacaatgataaagtagctggttttgctaaattcctaaaaactaattgttgtcgcttccaagaaaaggacgaagatgacaatttaattgattcttactttgtagttaagagacacactttctctaactaccaacatgaagaaacaatttataatttacttaaggattgtccagctgttgctaaacatgacttctttaagtttagaatagacggtgacatggtaccacatatatcacgtcaacgtcttactaaatacacaatggcagacctcgtctatgctttaaggcattttgatgaaggtaattgtgacacattaaaagaaatacttgtcacatacaattgttgtgatgatgattatttcaataaaaaggactggtatgattttgtagaaaacccagatatattacgcgtatacgccaacttaggtgaacgtgtacgccaagctttgttaaaaacagtacaattctgtgatgccatgcgaaatgctggtattgttggtgtactgacattagataatcaagatctcaatggtaactggtatgatttcggtgatttcatacaaaccacgccaggtagtggagttcctgttgtagattcttattattcattgttaatgcctatattaaccttgaccagggctttaactgcagagtcacatgttgacactgacttaacaaagccttacattaagtgggatttgttaaaatatgacttcacggaagagaggttaaaactctttgaccgttattttaaatattgggatcagacataccacccaaattgtgttaactgtttggatgacagatgcattctgcattgtgcaaactttaatgttttattctctacagtgttcccacctacaagttttggaccactagtgagaaaaatatttgttgatggtgttccatttgtagtttcaactggataccacttcagagagctaggtgttgtacataatcaggatgtaaacttacatagctctagacttagttttaaggaattacttgtgtatgctgctgaccctgctatgcacgctgcttctggtaatctattactagataaacgcactacgtgcttttcagtagctgcacttactaacaatgttgcttttcaaactgtcaaacccggtaattttaacaaagacttctatgactttgctgtgtctaagggtttctttaaggaaggaagttctgttgaattaaaacacttcttctttgctcaggatggtaatgctgctatcagcgattatgactactatcgttataatctaccaacaatgtgtgatatcagacaactactatttgtagttgaagttgttgataagtactttgattgttacgatggtggctgtattaatgctaaccaagtcatcgtcaacaacctagacaaatcagctggttttccatttaataaatggggtaaggctagactttattatgattcaatgagttatgaggatcaagatgcacttttcgcatatacaaaacgtaatgtcatccctactataactcaaatgaatcttaagtatgccattagtgcaaagaatagagctcgcaccgtagctggtgtctctatctgtagtactatgaccaatagacagtttcatcaaaaattattgaaatcaatagccgccactagaggagctactgtagtaattggaacaagcaaattctatggtggttggcacaacatgttaaaaactgtttatagtgatgtagaaaaccctcaccttatgggttgggattatcctaaatgtgatagagccatgcctaacatgcttagaattatggcctcacttgttcttgctcgcaaacatacaacgtgttgtagcttgtcacaccgtttctatagattagctaatgagtgtgctcaagtattgagtgaaatggtcatgtgtggcggttcactatatgttaaaccaggtggaacctcatcaggagatgccacaactgcttatgctaatagtgtttttaacatttgtcaagctgtcacggccaatgttaatgcacttttatctactgatggtaacaaaattgccgataagtatgtccgcaatttacaacacagactttatgagtgtctctatagaaatagagatgttgacacagactttgtgaatgagttttacgcatatttgcgtaaacatttctcaatgatgatactctctgacgatgctgttgtgtgtttcaatagcacttatgcatctcaaggtctagtggctagcataaagaactttaagtcagttctttattatcaaaacaatgtttttatgtctgaagcaaaatgttggactgagactgaccttactaaaggacctcatgaattttgctctcaacatacaatgctagttaaacagggtgatgattatgtgtaccttccttacccagatccatcaagaatcctaggggccggctgttttgtagatgatatcgtaaaaacagatggtacacttatgattgaacggttcgtgtctttagctatagatgcttacccacttactaaacatcctaatcaggagtatgctgatgtctttcatttgtacttacaatacataagaaagctacatgatgagttaacaggacacatgttagacatgtattctgttatgcttactaatgataacacttcaaggtattgggaacctgagttttatgaggctatgtacacaccgcatacagtcttacaggctgttggggcttgtgttctttgcaattcacagacttcattaagatgtggtgcttgcatacgtagaccattcttatgttgtaaatgctgttacgaccatgtcatatcaacatcacataaattagtcttgtctgttaatccgtatgtttgcaatgctccaggttgtgatgtcacagatgtgactcaactttacttaggaggtatgagctattattgtaaatcacataaaccacccattagttttccattgtgtgctaatggacaagtttttggtttatataaaaatacatgtgttggtagcgataatgttactgactttaatgcaattgcaacatgtgactggacaaatgctggtgattacattttagctaacacctgtactgaaagactcaagctttttgcagcagaaacgctcaaagctactgaggagacatttaaactgtcttatggtattgctactgtacgtgaagtgctgtctgacagagaattacatctttcatgggaagttggtaaacctagaccaccacttaaccgaaattatgtctttactggttatcgtgtaactaaaaacagtaaagtacaaataggagagtacacctttgaaaaaggtgactatggtgatgctgttgtttaccgaggtacaacaacttacaaattaaatgttggtgattattttgtgctgacatcacatacagtaatgccattaagtgcacctacactagtgccacaagagcactatgttagaattactggcttatacccaacactcaatatctcagatgagttttctagcaatgttgcaaattatcaaaaggttggtatgcaaaagtattctacactccagggaccacctggtactggtaagagtcattttgctattggcctagctctctactacccttctgctcgcatagtgtatacagcttgctctcatgccgctgttgatgcactatgtgagaaggcattaaaatatttgcctatagataaatgtagtagaattatacctgcacgtgctcgtgtagagtgttttgataaattcaaagtgaattcaacattagaacagtatgtcttttgtactgtaaatgcattgcctgagacgacagcagatatagttgtctttgatgaaatttcaatggccacaaattatgatttgagtgttgtcaatgccagattacgtgctaagcactatgtgtacattggcgaccctgctcaattacctgcaccacgcacattgctaactaagggcacactagaaccagaatatttcaattcagtgtgtagacttatgaaaactataggtccagacatgttcctcggaacttgtcggcgttgtcctgctgaaattgttgacactgtgagtgctttggtttatgataataagcttaaagcacataaagacaaatcagctcaatgctttaaaatgttttataagggtgttatcacgcatgatgtttcatctgcaattaacaggccacaaataggcgtggtaagagaattccttacacgtaaccctgcttggagaaaagctgtctttatttcaccttataattcacagaatgctgtagcctcaaagattttgggactaccaactcaaactgttgattcatcacagggctcagaatatgactatgtcatattcactcaaaccactgaaacagctcactcttgtaatgtaaacagatttaatgttgctattaccagagcaaaagtaggcatactttgcataatgtctgatagagacctttatgacaagttgcaatttacaagtcttgaaattccacgtaggaatgtggcaactttacaagctgaaaatgtaacaggactctttaaagattgtagtaaggtaatcactgggttacatcctacacaggcacctacacacctcagtgttgacactaaattcaaaactgaaggtttatgtgttgacatacctggcatacctaaggacatgacctatagaagactcatctctatgatgggttttaaaatgaattatcaagttaatggttaccctaacatgtttatcacccgcgaagaagctataagacatgtacgtgcatggattggcttcgatgtcgaggggtgtcatgctactagagaagctgttggtaccaatttacctttacagctaggtttttctacaggtgttaacctagttgctgtacctacaggttatgttgatacacctaataatacagatttttccagagttagtgctaaaccaccgcctggagatcaatttaaacacctcataccacttatgtacaaaggacttccttggaatgtagtgcgtataaagattgtacaaatgttaagtgacacacttaaaaatctctctgacagagtcgtatttgtcttatgggcacatggctttgagttgacatctatgaagtattttgtgaaaataggacctgagcgcacctgttgtctatgtgatagacgtgccacatgcttttccactgcttcagacacttatgcctgttggcatcattctattggatttgattacgtctataatccgtttatgattgatgttcaacaatggggttttacaggtaacctacaaagcaaccatgatctgtattgtcaagtccatggtaatgcacatgtagctagttgtgatgcaatcatgactaggtgtctagctgtccacgagtgctttgttaagcgtgttgactggactattgaatatcctataattggtgatgaactgaagattaatgcggcttgtagaaaggttcaacacatggttgttaaagctgcattattagcagacaaattcccagttcttcacgacattggtaaccctaaagctattaagtgtgtacctcaagctgatgtagaatggaagttctatgatgcacagccttgtagtgacaaagcttataaaatagaagaattattctattcttatgccacacattctgacaaattcacagatggtgtatgcctattttggaattgcaatgtcgatagatatcctgctaattccattgtttgtagatttgacactagagtgctatctaaccttaacttgcctggttgtgatggtggcagtttgtatgtaaataaacatgcattccacacaccagcttttgataaaagtgcttttgttaatttaaaacaattaccatttttctattactctgacagtccatgtgagtctcatggaaaacaagtagtgtcagatatagattatgtaccactaaagtctgctacgtgtataacacgttgcaatttaggtggtgctgtctgtagacatcatgctaatgagtacagattgtatctcgatgcttataacatgatgatctcagctggctttagcttgtgggtttacaaacaatttgatacttataacctctggaacacttttacaagacttcagagtttagaaaatgtggcttttaatgttgtaaataagggacactttgatggacaacagggtgaagtaccagtttctatcattaataacactgtttacacaaaagttgatggtgttgatgtagaattgtttgaaaataaaacaacattacctgttaatgtagcatttgagctttgggctaagcgcaacattaaaccagtaccagaggtgaaaatactcaataatttgggtgtggacattgctgctaatactgtgatctgggactacaaaagagatgctccagcacatatatctactattggtgtttgttctatgactgacatagccaagaaaccaactgaaacgatttgtgcaccactcactgtcttttttgatggtagagttgatggtcaagtagacttatttagaaatgcccgtaatggtgttcttattacagaaggtagtgttaaaggtttacaaccatctgtaggtcccaaacaagctagtcttaatggagtcacattaattggagaagccgtaaaaacacagttcaattattataagaaagttgatggtgttgtccaacaattacctgaaacttactttactcagagtagaaatttacaagaatttaaacccaggagtcaaatggaaattgatttcttagaattagctatggatgaattcattgaacggtataaattagaaggctatgccttcgaacatatcgtttatggagattttagtcatagtcagttaggtggtttacatctactgattggactagctaaacgttttaaggaatcaccttttgaattagaagattttattcctatggacagtacagttaaaaactatttcataacagatgcgcaaacaggttcatctaagtgtgtgtgttctgttattgatttattacttgatgattttgttgaaataataaaatcccaagatttatctgtagtttctaaggttgtcaaagtgactattgactatacagaaatttcatttatgctttggtgtaaagatggccatgtagaaacattttacccaaaattacaatctagtcaagcgtggcaaccgggtgttgctatgcctaatctttacaaaatgcaaagaatgctattagaaaagtgtgaccttcaaaattatggtgatagtgcaacattacctaaaggcataatgatgaatgtcgcaaaatatactcaactgtgtcaatatttaaacacattaacattagctgtaccctataatatgagagttatacattttggtgctggttctgataaaggagttgcaccaggtacagctgttttaagacagtggttgcctacgggtacgctgcttgtcgattcagatcttaatgactttgtctctgatgcagattcaactttgattggtgattgtgcaactgtacatacagctaataaatgggatctcattattagtgatatgtacgaccctaagactaaaaatgttacaaaagaaaatgactctaaagagggttttttcacttacatttgtgggtttatacaacaaaagctagctcttggaggttccgtggctataaagataacagaacattcttggaatgctgatctttataagctcatgggacacttcgcatggtggacagcctttgttactaatgtgaatgcgtcatcatctgaagcatttttaattggatgtaattatcttggcaaaccacgcgaacaaatagatggttatgtcatgcatgcaaattacatattttggaggaatacaaatccaattcagttgtcttcctattctttatttgacatgagtaaatttccccttaaattaaggggtactgctgttatgtctttaaaagaaggtcaaatcaatgatatgattttatctcttcttagtaaaggtagacttataattagagaaaacaacagagttgttatttctagtgatgttcttgttaacaactaaacgaacaatgtttgtttttcttgttttattgccactagtctctagtcagtgtgttaatcttacaaccagaactcaattaccccctgcatacactaattctttcacacgtggtgtttattaccctgacaaagttttcagatcctcagttttacattcaactcaggacttgttcttacctttcttttccaatgttacttggttccatgctatacatgtctctgggaccaatggtactaagaggtttgataaccctgtcctaccatttaatgatggtgtttattttgcttccactgagaagtctaacataataagaggctggatttttggtactactttagattcgaagacccagtccctacttattgttaataacgctactaatgttgttattaaagtctgtgaatttcaattttgtaatgatccatttttgggtgtttattaccacaaaaacaacaaaagttggatggaaagtgagttcagagtttattctagtgcgaataattgcacttttgaatatgtctctcagccttttcttatggaccttgaaggaaaacagggtaatttcaaaaatcttagggaatttgtgtttaagaatattgatggttattttaaaatatattctaagcacacgcctattaatttagtgcgtgatctcccccagggtttttcggctttagaaccattggtagatttgccaataggtattaacatcactaggtttcaaactttacttgctttacatagaagttatttgactcctggtgattcttcttcaggttggacagctggtgctgcagcttattatgtgggttatcttcaacctaggacttttctattaaaatataatgaaaatggaaccattacagatgctgtagactgtgcacttgaccctctctcagaaacaaagtgtacgttgaaatccttcactgtagaaaaaggaatctatcaaacttctaactttagagtccaaccaacagaatctattgttagatttcctaatattacaaacttgtgcccttttggtgaagtttttaacgccaccagatttgcatctgtttatgcttggaacaggaagagaatcagcaactgtgttgctgattattctgtcctatataattccgcatcattttccacttttaagtgttatggagtgtctcctactaaattaaatgatctctgctttactaatgtctatgcagattcatttgtaattagaggtgatgaagtcagacaaatcgctccagggcaaactggaaagattgctgattataattataaattaccagatgattttacaggctgcgttatagcttggaattctaacaatcttgattctaaggttggtggtaattataattacctgtatagattgtttaggaagtctaatctcaaaccttttgagagagatatttcaactgaaatctatcaggccggtagcacaccttgtaatggtgttgaaggttttaattgttactttcctttacaatcatatggtttccaacccactaatggtgttggttaccaaccatacagagtagtagtactttcttttgaacttctacatgcaccagcaactgtttgtggacctaaaaagtctactaatttggttaaaaacaaatgtgtcaatttcaacttcaatggtttaacaggcacaggtgttcttactgagtctaacaaaaagtttctgcctttccaacaatttggcagagacattgctgacactactgatgctgtccgtgatccacagacacttgagattcttgacattacaccatgttcttttggtggtgtcagtgttataacaccaggaacaaatacttctaaccaggttgctgttctttatcaggatgttaactgcacagaagtccctgttgctattcatgcagatcaacttactcctacttggcgtgtttattctacaggttctaatgtttttcaaacacgtgcaggctgtttaataggggctgaacatgtcaacaactcatatgagtgtgacatacccattggtgcaggtatatgcgctagttatcagactcagactaattctcctcggcgggcacgtagtgtagctagtcaatccatcattgcctacactatgtcacttggtgcagaaaattcagttgcttactctaataactctattgccatacccacaaattttactattagtgttaccacagaaattctaccagtgtctatgaccaagacatcagtagattgtacaatgtacatttgtggtgattcaactgaatgcagcaatcttttgttgcaatatggcagtttttgtacacaattaaaccgtgctttaactggaatagctgttgaacaagacaaaaacacccaagaagtttttgcacaagtcaaacaaatttacaaaacaccaccaattaaagattttggtggttttaatttttcacaaatattaccagatccatcaaaaccaagcaagaggtcatttattgaagatctacttttcaacaaagtgacacttgcagatgctggcttcatcaaacaatatggtgattgccttggtgatattgctgctagagacctcatttgtgcacaaaagtttaacggccttactgttttgccacctttgctcacagatgaaatgattgctcaatacacttctgcactgttagcgggtacaatcacttctggttggacctttggtgcaggtgctgcattacaaataccatttgctatgcaaatggcttataggtttaatggtattggagttacacagaatgttctctatgagaaccaaaaattgattgccaaccaatttaatagtgctattggcaaaattcaagactcactttcttccacagcaagtgcacttggaaaacttcaagatgtggtcaaccaaaatgcacaagctttaaacacgcttgttaaacaacttagctccaattttggtgcaatttcaagtgttttaaatgatatcctttcacgtcttgacaaagttgaggctgaagtgcaaattgataggttgatcacaggcagacttcaaagtttgcagacatatgtgactcaacaattaattagagctgcagaaatcagagcttctgctaatcttgctgctactaaaatgtcagagtgtgtacttggacaatcaaaaagagttgatttttgtggaaagggctatcatcttatgtccttccctcagtcagcacctcatggtgtagtcttcttgcatgtgacttatgtccctgcacaagaaaagaacttcacaactgctcctgccatttgtcatgatggaaaagcacactttcctcgtgaaggtgtctttgtttcaaatggcacacactggtttgtaacacaaaggaatttttatgaaccacaaatcattactacagacaacacatttgtgtctggtaactgtgatgttgtaataggaattgtcaacaacacagtttatgatcctttgcaacctgaattagactcattcaaggaggagttagataaatattttaagaatcatacatcaccagatgttgatttaggtgacatctctggcattaatgcttcagttgtaaacattcaaaaagaaattgaccgcctcaatgaggttgccaagaatttaaatgaatctctcatcgatctccaagaacttggaaagtatgagcagtatataaaatggccatggtacatttggctaggttttatagctggcttgattgccatagtaatggtgacaattatgctttgctgtatgaccagttgctgtagttgtctcaagggctgttgttcttgtggatcctgctgcaaatttgatgaagacgactctgagccagtgctcaaaggagtcaaattacattacacataaacgaacttatggatttgtttatgagaatcttcacaattggaactgtaactttgaagcaaggtgaaatcaaggatgctactccttcagattttgttcgcgctactgcaacgataccgatacaagcctcactccctttcggatggcttattgttggcgttgcacttcttgctgtttttcagagcgcttccaaaatcataaccctcaaaaagagatggcaactagcactctccaagggtgttcactttgtttgcaacttgctgttgttgtttgtaacagtttactcacaccttttgctcgttgctgctggccttgaagccccttttctctatctttatgctttagtctacttcttgcagagtataaactttgtaagaataataatgaggctttggctttgctggaaatgccgttccaaaaacccattactttatgatgccaactattttctttgctggcatactaattgttacgactattgtataccttacaatagtgtaacttcttcaattgtcattacttcaggtgatggcacaacaagtcctatttctgaacatgactaccagattggtggttatactgaaaaatgggaatctggagtaaaagactgtgttgtattacacagttacttcacttcagactattaccagctgtactcaactcaattgagtacagacactggtgttgaacatgttaccttcttcatctacaataaaattgttgatgagcctgaagaacatgtccaaattcacacaatcgacggttcatccggagttgttaatccagtaatggaaccaatttatgatgaaccgacgacgactactagcgtgcctttgtaagcacaagctgatgagtacgaacttatgtactcattcgtttcggaagagacaggtacgttaatagttaatagcgtacttctttttcttgctttcgtggtattcttgctagttacactagccatccttactgcgcttcgattgtgtgcgtactgctgcaatattgttaacgtgagtcttgtaaaaccttctttttacgtttactctcgtgttaaaaatctgaattcttctagagttcctgatcttctggtctaaacgaactaaatattatattagtttttctgtttggaactttaattttagccatggcagattccaacggtactattaccgttgaagagcttaaaaagctccttgaacaatggaacctagtaataggtttcctattccttacatggatttgtcttctacaatttgcctatgccaacaggaataggtttttgtatataattaagttaattttcctctggctgttatggccagtaactttagcttgttttgtgcttgctgctgtttacagaataaattggatcaccggtggaattgctatcgcaatggcttgtcttgtaggcttgatgtggctcagctacttcattgcttctttcagactgtttgcgcgtacgcgatccatgtggtcattcaatccagaaactaacattcttctcaacgtgccactccatggcactattctgaccagaccgcttctagaaagtgaactcgtaatcggagctgtgatccttcgtggacatcttcgtattgctggacaccatctaggacgctgtgacatcaaggacctgcctaaagaaatcactgttgctacatcacgaacgctttcttattacaaattgggagcttcgcagcgtgtagcaggtgactcaggttttgctgcatacagtcgctacaggattggcaactataaattaaacacagaccattccagtagcagtgacaatattgctttgcttgtacagtaagtgacaacagatgtttcatctcgttgactttcaggttactatagcagagatattactaattattatgaggacttttaaagtttccatttggaatcttgattacatcataaacctcataattaaaaatttatctaagtcactaactgagaataaatattctcaattagatgaagagcaaccaatggagattgattaaacgaacatgaaaattattcttttcttggcactgataacactcgctacttgtgagctttatcactaccaagagtgtgttagaggtacaacagtacttttaaaagaaccttgctcttctggaacatacgagggcaattcaccatttcatcctctagctgataacaaatttgcactgacttgctttagcactcaatttgcttttgcttgtcctgacggcgtaaaacacgtctatcagttacgtgccagatcagtttcacctaaactgttcatcagacaagaggaagttcaagaactttactctccaatttttcttattgttgcggcaatagtgtttataacactttgcttcacactcaaaagaaagacagaatgattgaactttcattaattgacttctatttgtgctttttagcctttctgctattccttgttttaattatgcttattatcttttggttctcacttgaactgcaagatcataatgaaacttgtcacgcctaaacgaacatgaaatttcttgttttcttaggaatcatcacaactgtagctgcatttcaccaagaatgtagtttacagtcatgtactcaacatcaaccatatgtagttgatgacccgtgtcctattcacttctattctaaatggtatattagagtaggagctagaaaatcagcacctttaattgaattgtgcgtggatgaggctggttctaaatcacccattcagtacatcgatatcggtaattatacagtttcctgtttaccttttacaattaattgccaggaacctaaattgggtagtcttgtagtgcgttgttcgttctatgaagactttttagagtatcatgacgttcgtgttgttttagatttcatctaaacgaacaaactaaaatgtctgataatggaccccaaaatcagcgaaatgcaccccgcattacgtttggtggaccctcagattcaactggcagtaaccagaatggagaacgcagtggggcgcgatcaaaacaacgtcggccccaaggtttacccaataatactgcgtcttggttcaccgctctcactcaacatggcaaggaagaccttaaattccctcgaggacaaggcgttccaattaacaccaatagcagtccagatgaccaaattggctactaccgaagagctaccagacgaattcgtggtggtgacggtaaaatgaaagatctcagtccaagatggtatttctactacctaggaactgggccagaagctggacttccctatggtgctaacaaagacggcatcatatgggttgcaactgagggagccttgaatacaccaaaagatcacattggcacccgcaatcctgctaacaatgctgcaatcgtgctacaacttcctcaaggaacaacattgccaaaaggcttctacgcagaagggagcagaggcggcagtcaagcctcttctcgttcctcatcacgtagtcgcaacagttcaagaaattcaactccaggcagcagtaggggaacttctcctgctagaatggctggcaatggcggtgatgctgctcttgctttgctgctgcttgacagattgaaccagcttgagagcaaaatgtctggtaaaggccaacaacaacaaggccaaactgtcactaagaaatctgctgctgaggcttctaagaagcctcggcaaaaacgtactgccactaaagcatacaatgtaacacaagctttcggcagacgtggtccagaacaaacccaaggaaattttggggaccaggaactaatcagacaaggaactgattacaaacattggccgcaaattgcacaatttgcccccagcgcttcagcgttcttcggaatgtcgcgcattggcatggaagtcacaccttcgggaacgtggttgacctacacaggtgccatcaaattggatgacaaagatccaaatttcaaagatcaagtcattttgctgaataagcatattgacgcatacaaaacattcccaccaacagagcctaaaaaggacaaaaagaagaaggctgatgaaactcaagccttaccgcagagacagaagaaacagcaaactgtgactcttcttcctgctgcagatttggatgatttctccaaacaattgcaacaatccatgagcagtgctgactcaactcaggcctaaactcatgcagaccacacaaggcagatgggctatataaacgttttcgcttttccgtttacgatatatagtctactcttgtgcagaatgaattctcgtaactacatagcacaagtagatgtagttaactttaatctcacatagcaatctttaatcagtgtgtaacattagggaggacttgaaagagccaccacattttcaccgaggccacgcggagtacgatcgagtgtacagtgaacaatgctagggagagctgcctatatggaagagccctaatgtgtaaaattaattttagtagtgctatccccatgtgattttaatagcttcttaggagaatgacaaaaaaaaaaaaaaaaaaaaaaaaaaaaaaaaaaaaaaaaaaaaaaaaaaaaaaaaaaagggtcggcatggcatctccacctcctcgcggtccgacctgggcatccgaaggaggacgcacgtccactcggatggctaagggagcagcacactggcggccgttactagggccgcgcccttcccaacagttgcgcagcctgaatggcgaatggagatccaatttttaagtgtataatgtgttaaactactgattctaattgtttgtgtattttagattcacagtcccaaggctcatttcaggcccctcagtcctcacagtctgttcatgatcataatcagccataccacatttgtagaggttttacttgctttaaaaaacctcccacacctccccctgaacctgaaacataaaatgaatgcaattgttgttgttaacttgtttattgcagcttataatggttacaaataaagcaatagcatcacaaatttcacaaataaagcatttttttcactgcattctagttgtggtttgtccaaactcatcaatgtatcttaaagcttgagtattctatagtctcacctaaatagcttggcgtaatcatggtcatagctgtttcctgtgtgaaattgttatccgctcacaattccacacaacatacgagccggaagcataaagtgtaaagcctggggtgcctaatgagtgagctaactcacattaattgcgttgcgctcactgcccgctttccagtcgggaaacctgtcgtgccagctgcattaatgaatcggccaacgcgaaccccttgcggccgcccgggccgtcgaccaattctcatgtttgacagcttatcatcgaatttctgccattcatccgcttattatcacttattcaggcgtagcaaccaggcgtttaagggcaccaataactgccttaaaaaaattacgccccgccctgccactcatcgcagtactgttgtaattcattaagcattctgccgacatggaagccatcacaaacggcatgatgaacctgaatcgccagcggcatcagcaccttgtcgccttgcgtataatatttgcccatggtgaaaacgggggcgaagaagttgtccatattggccacgtttaaatcaaaactggtgaaactcacccagggattggctgagacgaaaaacatattctcaataaaccctttagggaaataggccaggttttcaccgtaacacgccacatcttgcgaatatatgtgtagaaactgccggaaatcgtcgtggtattcactccagagcgatgaaaacgtttcagtttgctcatggaaaacggtgtaacaagggtgaacactatcccatatcaccagctcaccgtctttcattgccatacgaaattccggatgagcattcatcaggcgggcaagaatgtgaataaaggccggataaaacttgtgcttatttttctttacggtctttaaaaaggccgtaatatccagctgaacggtctggttataggtacattgagcaactgactgaaatgcctcaaaatgttctttacgatgccattgggatatatcaacggtggtatatccagtgatttttttctccattttagcttccttagctcctgaaaatctcgataactcaaaaaatacgcccggtagtgatcttatttcattatggtgaaagttggaacctcttacgtgccgatcaacgtctcattttcgccaaaagttggcccagggcttcccggtatcaacagggacaccaggatttatttattctgcgaagtgatcttccgtcacaggtatttattcgcgataagctcatggagcggcgtaaccgtcgcacaggaaggacagagaaagcgcggatctgggaagtgacggacagaacggtcaggacctggattggggaggcggttgccgccgctgctgctgacggtgtgacgttctctgttccggtcacaccacatacgttccgccattcctatgcgatgcacatgctgtatgccggtataccgctgaaagttctgcaaagcctgatgggacataagtccatcagttcaacggaagtctacacgaaggtttttgcgctggatgtggctgcccggcaccgggtgcagtttgcgatgccggagtctgatgcggttgcgatgctgaaacaattatcctgagaataaatgccttggcctttatatggaaatgtggaactgagtggatatgctgtttttgtctgttaaacagagaagctggctgttatccactgagaagcgaacgaaacagtcgggaaaatctcccattatcgtagagatccgcattattaatctcaggagcctgtgtagcgtttataggaagtagtgttctgtcatgatgcctgcaagcggtaacgaaaacgatttgaatatgccttcaggaacaatagaaatcttcgtgcggtgttacgttgaagtggagcggattatgtcagcaatggacagaacaacctaatgaacacagaaccatgatgtggtctgtccttttacagccagtagtgctcgccgcagtcgagcgacagggcgaagccctcggctggttgccctcgccgctgggctggcggccgtctatggccctgcaaacgcgccagaaacgccgtcgaagccgtgtgcgagacaccgcggccggccgccggcgttgtggatacctcgcggaaaacttggccctcactgacagatgaggggcggacgttgacacttgaggggccgactcacccggcgcggcgttgacagatgaggggcaggctcgatttcggccggcgacgtggagctggccagcctcgcaaatcggcgaaaacgcctgattttacgcgagtttcccacagatgatgtggacaagcctggggataagtgccctgcggtattgacacttgaggggcgcgactactgacagatgaggggcgcgatccttgacacttgaggggcagagtgctgacagatgaggggcgcacctattgacatttgaggggctgtccacaggcagaaaatccagcatttgcaagggtttccgcccgtttttcggccaccgctaacctgtcttttaacctgcttttaaaccaatatttataaaccttgtttttaaccagggctgcgccctgtgcgcgtgaccgcgcacgccgaaggggggtgcccccccttctcgaaccctcccggtcgagtgagcgaggaagcaccagggaacagcacttatatattctgcttacacacgatgcctgaaaaaacttcccttggggttatccacttatccacggggatatttttataattattttttttatagtttttagatcttcttttttagagcgccttgtaggcctttatccatgctggttctagagaaggtgttgtgacaaattgccctttcagtgtgacaaatcaccctcaaatgacagtcctgtctgtgacaaattgcccttaaccctgtgacaaattgccctcagaagaagctgttttttcacaaagttatccctgcttattgactcttttttatttagtgtgacaatctaaaaacttgtcacacttcacatggatctgtcatggcggaaacagcggttatcaatcacaagaaacgtaaaaatagcccgcgaatcgtccagtcaaacgacctcactgaggcggcatatagtctctcccgggatcaaaaacgtatgctgtatctgttcgttgaccagatcagaaaatctgatggcaccctacaggaacatgacggtatctgcgagatccatgttgctaaatatgctgaaatattcggattgacctctgcggaagccagtaaggatatacggcaggcattgaagagtttcgcggggaaggaagtggttttttatcgccctgaagaggatgccggcgatgaaaaaggctatgaatcttttccttggtttatcaaacgtgcgcacagtccatccagagggctttacagtgtacatatcaacccatatctcattcccttctttatcgggttacagaaccggtttacgcagtttcggcttagtgaaacaaaagaaatcaccaatccgtatgccatgcgtttatacgaatccctgtgtcagtatcgtaagccggatggctcaggcatcgtctctctgaaaatcgactggatcatagagcgttaccagctgcctcaaagttaccagcgtatgcctgacttccgccgccgcttcctgcaggtctgtgttaatgagatcaacagcagaactccaatgcgcctctcatacattgagaaaaagaaaggccgccagacgactcatatcgtattttccttccgcgatatcacttccatgacgacaggatagtctgagggttatctgtcacagatttgagggtggttcgtcacatttgttctgacctactgagggtaatttgtcacagttttgctgtttccttcagcctgcatggattttctcatactttttgaactgtaatttttaaggaagccaaatttgagggcagtttgtcacagttgatttccttctctttcccttcgtcatgtgacctgatatcgggggttagttcgtcatcattgatgagggttgattatcacagtttattactctgaattggctatccgcgtgtgtacctctacctggagtttttcccacggtggatatttcttcttgcgctgagcgtaagagctatctgacagaacagttcttctttgcttcctcgccagttcgctcgctatgctcggttacacggctgcggcg

SEQ ID NO: 24 - DNA, 35283 bp, Artificial Sequence
  Clone pCCI-4K-SARS-CoV-2-WWDDD. Based on SARS-CoV-2.
gatgtgctgcaaggcgattaagttgggtaacgccagggttttcccagtcacgacgttgtaaaacgacggccagtgaattgtaatacgactcactatagggcgaattctagttattaatagtaatcaattacggggtcattagttcatagcccatatatggagttccgcgttacataacttacggtaaatggcccgcctggctgaccgcccaacgacccccgcccattgacgtcaataatgacgtatgttcccatagtaacgccaatagggactttccattgacgtcaatgggtggagtatttacggtaaactgcccacttggcagtacatcaagtgtatcatatgccaagtacgccccctattgacgtcaatgacggtaaatggcccgcctggcattatgcccagtacatgaccttatgggactttcctacttggcagtacatctacgtattagtcatcgctattaccatggtgatgcggttttggcagtacatcaatgggcgtggatagcggtttgactcacggggatttccaagtctccaccccattgacgtcaatgggagtttgttttggcaccaaaatcaacgggactttccaaaatgtcgtaacaactccgccccattgacgcaaatgggcggtaggcgtgtacggtgggaggtctatataagcagagctggtttagtgaaccgtattaaaggtttataccttcccaggtaacaaaccaaccaactttcgatctcttgtagatctgttctctaaacgaactttaaaatctgtgtggctgtcactcggctgcatgcttagtgcactcacgcagtataattaataactaattactgtcgttgacaggacacgagtaactcgtctatcttctgcaggctgcttacggtttcgtccgtgttgcagccgatcatcagcacatctaggtttcgtccgggtgtgaccgaaaggtaagatggagagccttgtccctggtttcaacgagaaaacacacgtccaactcagtttgcctgttttacaggttcgcgacgtgctcgtacgtggctttggagactccgtggaggaggtcttatcagaggcacgtcaacatcttaaagatggcacttgtggcttagtagaagttgaaaaaggcgttttgcctcaacttgaacagccctatgtgttcatcaaacgttcggatgctcgaactgcacctcatggtcatgttatggttgagctggtagcagaactcgaaggcattcagtacggtcgtagtggtgagacacttggtgtccttgtccctcatgtgggcgaaataccagtggcttaccgcaaggttcttcttcgtaagaacggtaataaaggagctggtggccatagttacggcgccgatctaaagtcatttgacttaggcgacgagcttggcactgatccttatgaagattttcaagaaaactggaacactaaacatagcagtggtgttacccgtgaactcatgcgtgagcttaacggaggggcatacactcgctatgtcgataacaacttctgtggccctgatggctaccctcttgagtgcattaaagaccttctagcacgtgctggtaaagcttcatgcactttgtccgaacaactggactttattgacactaagaggggtgtatactgctgccgtgaacatgagcatgaaattgcttggtacacggaacgttctgaaaagagctatgaattgcagacaccttttgaaattaaattggcaaagaaatttgacaccttcaatggggaatgtccaaattttgtatttcccttaaattccataatcaagactattcaaccaagggttgaaaagaaaaagcttgatggctttatgggtagaattcgatctgtctatccagttgcgtcaccaaatgaatgcaaccaaatgtgcctttcaactctcatgaagtgtgatcattgtggtgaaacttcatggcagacgggcgattttgttaaagccacttgcgaattttgtggcactgagaatttgactaaagaaggtgccactacttgtggttacttaccccaaaatgctgttgttaaaatttattgtccagcatgtcacaattcagaagtaggacctgagcatagtcttgccgaataccataatgaatctggcttgaaaaccattcttcgtaagggtggtcgcactattgcctttggaggctgtgtgttctcttatgttggttgccataacaagtgtgcctattgggtcccacgtgctagcgctaacataggttgtaaccatacaggtgttgttggagaaggttccgaaggtcttaatgacaaccttcttgaaatactccaaaaagagaaagtcaacatcaatattgttggtgactttaaacttaatgaagagatcgccattattttggcatctttttctgcttccacaagtgcttttgtggaaactgtgaaaggtttggattataaagcattcaaacaaattgttgaatcctgtggtaattttaaagttacaaaaggaaaagctaaaaaaggtgcctggaatattggtgaacagaaatcaatactgagtcctctttatgcatttgcatcagaggctgctcgtgttgtacgatcaattttctcccgcactcttgaaactgctcaaaattctgtgcgtgttttacagaaggccgctataacaatactagatggaatttcacagtattcactgagactcattgatgctatgatgttcacatctgatttggctactaacaatctagttgtaatggcctacattacaggtggtgttgttcagttgacttcgcagtggctaactaacatctttggcactgtttatgaaaaactcaaacccgtccttgattggcttgaagagaagtttaaggaaggtgtagagtttcttagagacggttgggaaattgttaaatttatctcaacctgtgcttgtgaaattgtcggtggacaaattgtcacctgtgcaaaggaaattaaggagagtgttcagacattctttaagcttgtaaataaatttttggctttgtgtgctgactctatcattattggtggagctaaacttaaagccttgaatttaggtgaaacatttgtcacgcactcaaagggattgtacagaaagtgtgttaaatccagagaagaaactggcctactcatgcctctaaaagccccaaaagaaattatcttcttagagggagaaacacttcccacagaagtgttaacagaggaagttgtcttgaaaactggtgatttacaaccattagaacaacctactagtgaagctgttgaagctccattggttggtacaccagtttgtattaacgggcttatgttgctcgaaatcaaagacacagaaaagtactgtgcccttgcacctaatatgatggtaacaaacaataccttcacactcaaaggcggtgcaccaacaaaggttacttttggtgatgacactgtgatagaagtgcaaggttacaagagtgtgaatatcacttttgaacttgatgaaaggattgataaagtacttaatgagaagtgctctgcctatacagttgaactcggtacagaagtaaatgagttcgcctgtgttgtggcagatgctgtcataaaaactttgcaaccagtatctgaattacttacaccactgggcattgatttagatgagtggagtatggctacatactacttatttgatgagtctggtgagtttaaattggcttcacatatgtattgttctttctaccctccagatgaggatgaagaagaaggtgattgtgaagaagaagagtttgagccatcaactcaatatgagtatggtactgaagatgattaccaaggtaaacctttggaatttggtgccacttctgctgctcttcaacctgaagaagagcaagaagaagattggttagatgatgatagtcaacaaactgttggtcaacaagacggcagtgaggacaatcagacaactactattcaaacaattgttgaggttcaacctcaattagagatggaacttacaccagttgttcagactattgaagtgaatagttttagtggttatttaaaacttactgacaatgtatacattaaaaatgcagacattgtggaagaagctaaaaaggtaaaaccaacagtggttgttaatgcagccaatgtttaccttaaacatggaggaggtgttgcaggagccttaaataaggctactaacaatgccatgcaagttgaatctgatgattacatagctactaatggaccacttaaagtgggtggtagttgtgttttaagcggacacaatcttgctaaacactgtcttcatgttgtcggcccaaatgttaacaaaggtgaagacattcaacttcttaagagtgcttatgaaaattttaatcagcacgaagttctacttgcaccattattatcagctggtatttttggtgctgaccctatacattctttaagagtttgtgtagatactgttcgcacaaatgtctacttagctgtctttgataaaaatctctatgacaaacttgtttcaagctttttggaaatgaagagtgaaaagcaagttgaacaaaagatcgctgagattcctaaagaggaagttaagccatttataactgaaagtaaaccttcagttgaacagagaaaacaagatgataagaaaatcaaagcttgtgttgaagaagttacaacaactctggaagaaactaagttcctcacagaaaacttgttactttatattgacattaatggcaatcttcatccagattctgccactcttgttagtgacattgacatcactttcttaaagaaagatgctccatatatagtgggtgatgttgttcaagagggtgttttaactgctgtggttatacctactaaaaaggctggtggcactactgaaatgctagcgaaagctttgagaaaagtgccaacagacaattatataaccacttacccgggtcagggtttaaatggttacactgtagaggaggcaaagacagtgcttaaaaagtgtaaaagtgccttttacattctaccatctattatctctaatgagaagcaagaaattcttggaactgtttcttggaatttgcgagaaatgcttgcacatgcagaagaaacacgcaaattaatgcctgtctgtgtggaaactaaagccatagtttcaactatacagcgtaaatataagggtattaaaatacaagagggtgtggttgattatggtgctagattttacttttacaccagtaaaacaactgtagcgtcacttatcaacacacttaacgatctaaatgaaactcttgttacaatgccacttggctatgtaacacatggcttaaatttggaagaagctgctcggtatatgagatctctcaaagtgccagctacagtttctgtttcttcacctgatgctgttacagcgtataatggttatcttacttcttcttctaaaacacctgaagaacattttattgaaaccatctcacttgctggttcctataaagattggtcctattctggacaatctacacaactaggtatagaatttcttaagagaggtgataaaagtgtatattacactagtaatcctaccacattccacctagatggtgaagttatcacctttgacaatcttaagacacttctttctttgagagaagtgaggactattaaggtgtttacaacagtagacaacattaacctccacacgcaagttgtggacatgtcaatgacatatggacaacagtttggtccaacttatttggatggagctgatgttactaaaataaaacctcataattcacatgaaggtaaaacattttatgttttacctaatgatgacactctacgtgttgaggcttttgagtactaccacacaactgatcctagttttctgggtaggtacatgtcagcattaaatcacactaaaaagtggaaatacccacaagttaatggtttaacttctattaaatgggcagataacaactgttatcttgccactgcattgttaacactccaacaaatagagttgaagtttaatccacctgctctacaagatgcttattacagagcaagggctggtgaagctgctaacttttgtgcacttatcttagcctactgtaataagacagtaggtgagttaggtgatgttagagaaacaatgagttacttgtttcaacatgccaatttagattcttgcaaaagagtcttgaacgtggtgtgtaaaacttgtggacaacagcagacaacccttaagggtgtagaagctgttatgtacatgggcacactttcttatgaacaatttaagaaaggtgttcagataccttgtacgtgtggtaaacaagctacaaaatatctagtacaacaggagtcaccttttgttatgatgtcagcaccacctgctcagtatgaacttaagcatggtacatttacttgtgctagtgagtacactggtaattaccagtgtggtcactataaacatataacttctaaagaaactttgtattgcatagacggtgctttacttacaaagtcctcagaatacaaaggtcctattacggatgttttctacaaagaaaacagttacacaacaaccataaaaccagttacttataaattggatggtgttgtttgtacagaaattgaccctaagttggacaattattataagaaagacaattcttatttcacagagcaaccaattgatcttgtaccaaaccaaccatatccaaacgcaagcttcgataattttaagtttgtatgtgataatatcaaatttgctgatgatttaaaccagttaactggttataagaaacctgcttcaagagagcttaaagttacatttttccctgacttaaatggtgatgtggtggctattgattataaacactacacaccctcttttaagaaaggagctaaattgttacataaacctattgtttggcatgttaacaatgcaactaataaagccacgtataaaccaaatacctggtgtatacgttgtctttggagcacaaaaccagttgaaacatcaaattcgtttgatgtactgaagtcagaggacgcgcagggaatggataatcttgcctgcgaagatctaaaaccagtctctgaagaagtagtggaaaatcctaccatacagaaagacgttcttgagtgtaatgtgaaaactaccgaagttgtaggagacattatacttaaaccagcaaataatagtttaaaaattacagaagaggttggccacacagatctaatggctgcttatgtagacaattctagtcttactattaagaaacctaatgaattatctagagtattaggtttgaaaacccttgctactcatggtttagctgctgttaatagtgtcccttgggatactatagctaattatgctaagccttttcttaacaaagttgttagtacaactactaacatagttacacggtgtttaaaccgtgtttgtactaattatatgccttatttctttactttattgctacaattgtgtacttttactagaagtacaaattctagaattaaagcatctatgccgactactatagcaaagaatactgttaagagtgtcggtaaattttgtctagaggcttcatttaattatttgaagtcacctaatttttctaaactgataaatattataatttggtttttactattaagtgtttgcctaggttcgttaatatattcgacggcggcgttaggtgtattaatgtcgaatttaggtatgccgtcgtattgtacgggttatcgtgaaggttatttaaattcgacgaatgtaacgatagcgacgtattgtacgggttcgataccgtgttcggtatgtctatcgggtttagattcgttagatacgtatccgtcgttagaaacgatacaaataacgatatcgtcgtttaaatgggatttaacggcgtttggtttagtagcggaatggtttttagcgtatatactatttacgcgatttttttatgtactaggtttagcggcgataatgcaattatttttttcgtattttgcggtacattttatttcgaattcgtggctaatgtggttaataataaatctagtacaaatggcgccgatatcggcgatggtacgtatgtatatattttttgcgtcgttttattatgtatggaaatcgtatgtacatgtagtagatggttgtaattcgtcgacgtgtatgatgtgttataaacgtaatcgtgcgacgcgagtagaatgtacgacgatagtaaatggtgtacgtcgttcgttttatgtatatgcgaatggtggtaaaggtttttgtaaactacataattggaattgtgtaaattgtgatacgttttgtgcgggttcgacgtttatatcggatgaagtagcgcgtgatttatcgctacaatttaaacgtccgataaatccgacggatcaatcgtcgtatatagtagattcggtaacggtaaaaaatggttcgatacatctatattttgataaagcgggtcaaaaaacgtatgaacgtcattcgctatcgcattttgtaaatttagataatctacgtgcgaataatacgaaaggttcgttaccgataaatgtaatagtatttgatggtaaatcgaaatgtgaagaatcgtcggcgaaatcggcgtcggtatattattcgcaactaatgtgtcaaccgatactattactagatcaagcgttagtatcggatgtaggtgattcggcggaagtagcggtaaaaatgtttgatgcgtatgtaaatacgttttcgtcgacgtttaatgtaccgatggaaaaactaaaaacgctagtagcgacggcggaagcggaactagcgaaaaatgtatctttagataatgtattatcgacgtttatatcggcggcgcgtcaaggttttgtagattcggatgtagaaacgaaagatgtagtagaatgtctaaaattatcgcatcaatcggatatagaagtaacgggtgattcgtgtaataattatatgctaacgtataataaagtagaaaatatgacgccgcgtgatctaggtgcgtgtatagattgttcggcgcgtcatataaatgcgcaagtagcgaaatcgcataatatagcgttaatatggaatgtaaaagattttatgtcgttatcggaacaactacgtaaacaaatacgttcggcggcgaaaaaaaataatttaccgtttaaattaacgtgtgcgacgacgcgacaagtagtaaatgtagtaacgacgaaaatagcgctaaaaggtggtaaaatagtaaataattggttaaaacaattaattaaagtaacgctagtatttctatttgtagcggcgatattttatttaataacgccggtacatgtaatgtcgaaacatacggatttttcgtcggaaataataggttataaagcgatagatggtggtgtaactcgtgatatagcgtcgacggatacgtgttttgcgaataaacatgcggattttgatacgtggttttcgcaacgtggtggttcgtatacgaatgataaagcgtgtccgttaatagcggcggtaataacacgtgaagtaggttttgtagtaccgggtttaccgggtacgatattacgtacgacgaatggtgattttttacattttttaccgcgtgtattttcggcggtaggtaatatatgttatacgccgtcgaaactaatagaatatacggattttgcgacgtcggcgtgtgtattagcggcggaatgtacgatatttaaagatgcgtcgggtaaaccggtaccgtattgttatgatacgaatgtactagaaggttcggtagcgtatgaatcgttacgcccggatacacgttatgtactaatggatggttcgataatacaatttccgaatacgtatctagaaggttcggtacgtgtagtaacgacgtttgattcggaatattgtcgtcatggtacgtgtgaacgttcggaagcgggtgtatgtgtatcgacgtcggggcgttgggtactaaataatgattattatcgttcgttaccgggtgtattctgtggtgtagatgcggtaaatttactaacgaatatgtttacgccgctgatacaaccgataggtgcgttagatatatcggcgtcgatagtagcgggtggtatagtagcgatagtagtaacgtgtctagcgtattattttatgcgttttcgtcgtgcgtttggtgaatattcgcatgtagtagcgtttaatacgttactatttctaatgtcttttacagtactatgtttaacgccggtatattcttttttaccgggtgtatattcggtaatatatttatatttaacgttttatctaacgaatgatgtatcgtttttagcgcatatacaatggatggtaatgtttacgccgttagtaccgttttggataacaatagcgtatataatatgtatatcgacgaaacatttttattggtttttttcgaattatctgaaacgtcgtgtagtatttaatggtgtatctttttcgacgtttgaagaagcggcgctatgtacatttttattaaataaagaaatgtatctaaaattacgttcggatgtactattaccgctaacgcaatataatcgttatttagcgctatataataaatataaatatttttcgggtgcgatggatacgacgtcgtatcgtgaagcggcgtgttgtcatctagcgaaagcgctaaatgatttttcgaattcgggttcggatgtactatatcaaccgccgcaaacgtcgataacgtcggcggtattacaatcgggttttcgtaaaatggcgtttccgtcgggtaaagtagaaggttgtatggtacaagtaacgtgtggtacgacgacgctaaatggtctatggctagatgatgtagtatattgtccgcgtcatgtaatatgtacgtcggaagatatgctaaatccgaattatgaagatttactaatacgtaaatcgaatcataattttttagtacaagcgggtaatgtacaactacgtgtaataggtcattcgatgcaaaattgtgtactaaaactaaaagtagatacggcgaatccgaaaacaccgaaatataaatttgtacgtatacaaccgggtcaaacgttttcggtattagcgtgttataatggttctccgtcgggtgtatatcaatgtgcgatgcgtccgaattttacgattaaaggttcgtttctaaatggttcgtgtggttcggtaggttttaatatagattatgattgtgtatcgttttgttatatgcatcatatggaattaccgacgggtgtacatgcgggtacggatttagaaggtaatttttatggtccgtttgtagatcgtcaaacagcgcaagcggcgggtacggatacgacgattacggtaaatgtattagcgtggttatatgcggcggtaataaatggtgatcgttggtttctaaatcgttttacgacgacgctaaatgattttaatctagtagcgatgaaatataattatgaaccgctgacacaagatcatgtagatatactaggtccgctatcggcgcaaacgggtatagcggtattagatatgtgtgcgtcgttaaaagaattactacaaaatggtatgaatggtcgtacgatattaggttcggcgttattagaagatgaatttacgccgtttgatgtagtacgtcaatgttcgggtgtaacgtttcaatcggcggtaaaacgtacgataaaaggtacgcatcattggttattactaacgatattaacgtcgctattagtattagtacaatcgacgcaatggtcgttatttttttttttatatgaaaatgcgtttttaccgtttgcgatgggtataatagcgatgtcggcgtttgcgatgatgtttgtaaaacataagcatgcgtttctatgtttatttttattaccgtcgctagcgacggtagcgtattttaatatggtatatatgccggcgtcgtgggtaatgcgtataatgacgtggttagatatggtagatacgtcgttatcgggttttaaactaaaagattgtgtaatgtatgcgtcggcggtagtattactaatactaatgacggcgcgtacggtatatgatgatggtgcgcgtcgtgtatggacgctaatgaatgtattaacgctagtatataaagtatattatgggaatgcgttagatcaagcgatatcgatgtgggcgctaataatatcggtaacgtcgaattattcgggtgtagtaacgacggtaatgtttttagcgcgtggtatagtatttatgtgtgtagaatattgtccgatattttttataacgggtaatacactacaatgtataatgctagtatattgttttttaggttatttttgtacgtgttattttggtctattttgtttactaaatcgttattttcgtctaacactaggtgtatatgattatttagtatcgacgcaagaatttcgttatatgaattcgcaaggtctactaccgccgaaaaattcgatagatgcgtttaaactaaatataaaattattaggtgtaggtggtaaaccgtgtataaaagtagcgacggtacaatcgaaaatgtcggatgtaaaatgtacatcggtagtattactatcggtattacaacaactacgtgtagaatcgtcgtcgaaattatgggcgcaatgtgtacaattacataatgatatactattagcgaaagatacgacggaagcgtttgaaaaaatggtatcgctactatcggtattactatcgatgcaaggtgcggtagatataaataaactatgtgaagaaatgctagataatcgtgcgacgttacaagcgatagcgtcggaattttcgtcgctaccgtcgtatgcggcgtttgcgacggcgcaagaagcgtatgaacaagcggtagcgaatggtgattcggaagtagtactaaaaaaattaaaaaaatcgttaaatgtagcgaaatcggaatttgatcgtgatgcggcgatgcaacgtaaattagaaaaaatggcggatcaagcgatgacgcaaatgtataaacaagcgcgttcggaagataaacgtgcgaaagtaacgtcggcgatgcaaacgatgctatttacgatgctacgtaaattagataatgatgcgctaaataatataataaataatgcgcgtgatggttgtgtaccgttaaatataataccgctaacgacggcggcgaaactaatggtagtaataccggattataatacatataaaaatacgtgtgatggtacgacgtttacgtatgcgtcggcgttatgggaaatacaacaagtagtagatgcggattcgaaaatagtacaactatcggaaatatcgatggataattcgccgaatttagcgtggccgctaatagtaacggcgttacgtgcgaattcggcggtaaaattacaaaataatgaactatcgccggtagcgctacgacagatgtcttgtgctgccggtactacacaaactgcttgcactgatgacaatgcgttagcttactacaacacaacaaagggaggtaggtttgtacttgcactgttatccgatttacaggatttgaaatgggctagattccctaagagtgatggaactggtactatctatacagaactggaaccaccttgtaggtttgttacagacacacctaaaggtcctaaagtgaagtatttatactttattaaaggattaaacaacctaaatagaggtatggtacttggtagtttagctgccacagtacgtctacaagctggtaatgcaacagaagtgcctgccaattcaactgtattatctttctgtgcttttgctgtagatgctgctaaagcttacaaagattatctagctagtgggggacaaccaatcactaattgtgttaagatgttgtgtacacacactggtactggtcaggcaataacagttacaccggaagccaatatggatcaagaatcctttggtggtgcatcgtgttgtctgtactgccgttgccacatagatcatccaaatcctaaaggattttgtgacttaaaaggtaagtatgtacaaatacctacaacttgtgctaatgaccctgtgggttttacacttaaaaacacagtctgtaccgtctgcggtatgtggaaaggttatggctgtagttgtgatcaactccgcgaacccatgcttcagtcagctgatgcacaatcgtttttaaacgggtttgcggtgtaagtgcagcccgtcttacaccgtgcggcacaggcactagtactgatgtcgtatacagggcttttgacatctacaatgataaagtagctggttttgctaaattcctaaaaactaattgttgtcgcttccaagaaaaggacgaagatgacaatttaattgattcttactttgtagttaagagacacactttctctaactaccaacatgaagaaacaatttataatttacttaaggattgtccagctgttgctaaacatgacttctttaagtttagaatagacggtgacatggtaccacatatatcacgtcaacgtcttactaaatacacaatggcagacctcgtctatgctttaaggcattttgatgaaggtaattgtgacacattaaaagaaatacttgtcacatacaattgttgtgatgatgattatttcaataaaaaggactggtatgattttgtagaaaacccagatatattacgcgtatacgccaacttaggtgaacgtgtacgccaagctttgttaaaaacagtacaattctgtgatgccatgcgaaatgctggtattgttggtgtactgacattagataatcaagatctcaatggtaactggtatgatttcggtgatttcatacaaaccacgccaggtagtggagttcctgttgtagattcttattattcattgttaatgcctatattaaccttgaccagggctttaactgcagagtcacatgttgacactgacttaacaaagccttacattaagtgggatttgttaaaatatgacttcacggaagagaggttaaaactctttgaccgttattttaaatattgggatcagacataccacccaaattgtgttaactgtttggatgacagatgcattctgcattgtgcaaactttaatgttttattctctacagtgttcccacctacaagttttggaccactagtgagaaaaatatttgttgatggtgttccatttgtagtttcaactggataccacttcagagagctaggtgttgtacataatcaggatgtaaacttacatagctctagacttagttttaaggaattacttgtgtatgctgctgaccctgctatgcacgctgcttctggtaatctattactagataaacgcactacgtgcttttcagtagctgcacttactaacaatgttgcttttcaaactgtcaaacccggtaattttaacaaagacttctatgactttgctgtgtctaagggtttctttaaggaaggaagttctgttgaattaaaacacttcttctttgctcaggatggtaatgctgctatcagcgattatgactactatcgttataatctaccaacaatgtgtgatatcagacaactactatttgtagttgaagttgttgataagtactttgattgttacgatggtggctgtattaatgctaaccaagtcatcgtcaacaacctagacaaatcagctggttttccatttaataaatggggtaaggctagactttattatgattcaatgagttatgaggatcaagatgcacttttcgcatatacaaaacgtaatgtcatccctactataactcaaatgaatcttaagtatgccattagtgcaaagaatagagctcgcaccgtagctggtgtctctatctgtagtactatgaccaatagacagtttcatcaaaaattattgaaatcaatagccgccactagaggagctactgtagtaattggaacaagcaaattctatggtggttggcacaacatgttaaaaactgtttatagtgatgtagaaaaccctcaccttatgggttgggattatcctaaatgtgatagagccatgcctaacatgcttagaattatggcctcacttgttcttgctcgcaaacatacaacgtgttgtagcttgtcacaccgtttctatagattagctaatgagtgtgctcaagtattgagtgaaatggtcatgtgtggcggttcactatatgttaaaccaggtggaacctcatcaggagatgccacaactgcttatgctaatagtgtttttaacatttgtcaagctgtcacggccaatgttaatgcacttttatctactgatggtaacaaaattgccgataagtatgtccgcaatttacaacacagactttatgagtgtctctatagaaatagagatgttgacacagactttgtgaatgagttttacgcatatttgcgtaaacatttctcaatgatgatactctctgacgatgctgttgtgtgtttcaatagcacttatgcatctcaaggtctagtggctagcataaagaactttaagtcagttctttattatcaaaacaatgtttttatgtctgaagcaaaatgttggactgagactgaccttactaaaggacctcatgaattttgctctcaacatacaatgctagttaaacagggtgatgattatgtgtaccttccttacccagatccatcaagaatcctaggggccggctgttttgtagatgatatcgtaaaaacagatggtacacttatgattgaacggttcgtgtctttagctatagatgcttacccacttactaaacatcctaatcaggagtatgctgatgtctttcatttgtacttacaatacataagaaagctacatgatgagttaacaggacacatgttagacatgtattctgttatgcttactaatgataacacttcaaggtattgggaacctgagttttatgaggctatgtacacaccgcatacagtcttacaggctgttggggcttgtgttctttgcaattcacagacttcattaagatgtggtgcttgcatacgtagaccattcttatgttgtaaatgctgttacgaccatgtcatatcaacatcacataaattagtcttgtctgttaatccgtatgtttgcaatgctccaggttgtgatgtcacagatgtgactcaactttacttaggaggtatgagctattattgtaaatcacataaaccacccattagttttccattgtgtgctaatggacaagtttttggtttatataaaaatacatgtgttggtagcgataatgttactgactttaatgcaattgcaacatgtgactggacaaatgctggtgattacattttagctaacacctgtactgaaagactcaagctttttgcagcagaaacgctcaaagctactgaggagacatttaaactgtcttatggtattgctactgtacgtgaagtgctgtctgacagagaattacatctttcatgggaagttggtaaacctagaccaccacttaaccgaaattatgtctttactggttatcgtgtaactaaaaacagtaaagtacaaataggagagtacacctttgaaaaaggtgactatggtgatgctgttgtttaccgaggtacaacaacttacaaattaaatgttggtgattattttgtgctgacatcacatacagtaatgccattaagtgcacctacactagtgccacaagagcactatgttagaattactggcttatacccaacactcaatatctcagatgagttttctagcaatgttgcaaattatcaaaaggttggtatgcaaaagtattctacactccagggaccacctggtactggtaagagtcattttgctattggcctagctctctactacccttctgctcgcatagtgtatacagcttgctctcatgccgctgttgatgcactatgtgagaaggcattaaaatatttgcctatagataaatgtagtagaattatacctgcacgtgctcgtgtagagtgttttgataaattcaaagtgaattcaacattagaacagtatgtcttttgtactgtaaatgcattgcctgagacgacagcagatatagttgtctttgatgaaatttcaatggccacaaattatgatttgagtgttgtcaatgccagattacgtgctaagcactatgtgtacattggcgaccctgctcaattacctgcaccacgcacattgctaactaagggcacactagaaccagaatatttcaattcagtgtgtagacttatgaaaactataggtccagacatgttcctcggaacttgtcggcgttgtcctgctgaaattgttgacactgtgagtgctttggtttatgataataagcttaaagcacataaagacaaatcagctcaatgctttaaaatgttttataagggtgttatcacgcatgatgtttcatctgcaattaacaggccacaaataggcgtggtaagagaattccttacacgtaaccctgcttggagaaaagctgtctttatttcaccttataattcacagaatgctgtagcctcaaagattttgggactaccaactcaaactgttgattcatcacagggctcagaatatgactatgtcatattcactcaaaccactgaaacagctcactcttgtaatgtaaacagatttaatgttgctattaccagagcaaaagtaggcatactttgcataatgtctgatagagacctttatgacaagttgcaatttacaagtcttgaaattccacgtaggaatgtggcaactttacaagctgaaaatgtaacaggactctttaaagattgtagtaaggtaatcactgggttacatcctacacaggcacctacacacctcagtgttgacactaaattcaaaactgaaggtttatgtgttgacatacctggcatacctaaggacatgacctatagaagactcatctctatgatgggttttaaaatgaattatcaagttaatggttaccctaacatgtttatcacccgcgaagaagctataagacatgtacgtgcatggattggcttcgatgtcgaggggtgtcatgctactagagaagctgttggtaccaatttacctttacagctaggtttttctacaggtgttaacctagttgctgtacctacaggttatgttgatacacctaataatacagatttttccagagttagtgctaaaccaccgcctggagatcaatttaaacacctcataccacttatgtacaaaggacttccttggaatgtagtgcgtataaagattgtacaaatgttaagtgacacacttaaaaatctctctgacagagtcgtatttgtcttatgggcacatggctttgagttgacatctatgaagtattttgtgaaaataggacctgagcgcacctgttgtctatgtgatagacgtgccacatgcttttccactgcttcagacacttatgcctgttggcatcattctattggatttgattacgtctataatccgtttatgattgatgttcaacaatggggttttacaggtaacctacaaagcaaccatgatctgtattgtcaagtccatggtaatgcacatgtagctagttgtgatgcaatcatgactaggtgtctagctgtccacgagtgctttgttaagcgtgttgactggactattgaatatcctataattggtgatgaactgaagattaatgcggcttgtagaaaggttcaacacatggttgttaaagctgcattattagcagacaaattcccagttcttcacgacattggtaaccctaaagctattaagtgtgtacctcaagctgatgtagaatggaagttctatgatgcacagccttgtagtgacaaagcttataaaatagaagaattattctattcttatgccacacattctgacaaattcacagatggtgtatgcctattttggaattgcaatgtcgatagatatcctgctaattccattgtttgtagatttgacactagagtgctatctaaccttaacttgcctggttgtgatggtggcagtttgtatgtaaataaacatgcattccacacaccagcttttgataaaagtgcttttgttaatttaaaacaattaccatttttctattactctgacagtccatgtgagtctcatggaaaacaagtagtgtcagatatagattatgtaccactaaagtctgctacgtgtataacacgttgcaatttaggtggtgctgtctgtagacatcatgctaatgagtacagattgtatctcgatgcttataacatgatgatctcagctggctttagcttgtgggtttacaaacaatttgatacttataacctctggaacacttttacaagacttcagagtttagaaaatgtggcttttaatgttgtaaataagggacactttgatggacaacagggtgaagtaccagtttctatcattaataacactgtttacacaaaagttgatggtgttgatgtagaattgtttgaaaataaaacaacattacctgttaatgtagcatttgagctttgggctaagcgcaacattaaaccagtaccagaggtgaaaatactcaataatttgggtgtggacattgctgctaatactgtgatctgggactacaaaagagatgctccagcacatatatctactattggtgtttgttctatgactgacatagccaagaaaccaactgaaacgatttgtgcaccactcactgtcttttttgatggtagagttgatggtcaagtagacttatttagaaatgcccgtaatggtgttcttattacagaaggtagtgttaaaggtttacaaccatctgtaggtcccaaacaagctagtcttaatggagtcacattaattggagaagccgtaaaaacacagttcaattattataagaaagttgatggtgttgtccaacaattacctgaaacttactttactcagagtagaaatttacaagaatttaaacccaggagtcaaatggaaattgatttcttagaattagctatggatgaattcattgaacggtataaattagaaggctatgccttcgaacatatcgtttatggagattttagtcatagtcagttaggtggtttacatctactgattggactagctaaacgttttaaggaatcaccttttgaattagaagattttattcctatggacagtacagttaaaaactatttcataacagatgcgcaaacaggttcatctaagtgtgtgtgttctgttattgatttattacttgatgattttgttgaaataataaaatcccaagatttatctgtagtttctaaggttgtcaaagtgactattgactatacagaaatttcatttatgctttggtgtaaagatggccatgtagaaacattttacccaaaattacaatctagtcaagcgtggcaaccgggtgttgctatgcctaatctttacaaaatgcaaagaatgctattagaaaagtgtgaccttcaaaattatggtgatagtgcaacattacctaaaggcataatgatgaatgtcgcaaaatatactcaactgtgtcaatatttaaacacattaacattagctgtaccctataatatgagagttatacattttggtgctggttctgataaaggagttgcaccaggtacagctgttttaagacagtggttgcctacgggtacgctgcttgtcgattcagatcttaatgactttgtctctgatgcagattcaactttgattggtgattgtgcaactgtacatacagctaataaatgggatctcattattagtgatatgtacgaccctaagactaaaaatgttacaaaagaaaatgactctaaagagggttttttcacttacatttgtgggtttatacaacaaaagctagctcttggaggttccgtggctataaagataacagaacattcttggaatgctgatctttataagctcatgggacacttcgcatggtggacagcctttgttactaatgtgaatgcgtcatcatctgaagcatttttaattggatgtaattatcttggcaaaccacgcgaacaaatagatggttatgtcatgcatgcaaattacatattttggaggaatacaaatccaattcagttgtcttcctattctttatttgacatgagtaaatttccccttaaattaaggggtactgctgttatgtctttaaaagaaggtcaaatcaatgatatgattttatctcttcttagtaaaggtagacttataattagagaaaacaacagagttgttatttctagtgatgttcttgttaacaactaaacgaacaatgtttgtttttcttgttttattgccactagtctctagtcagtgtgttaatcttacaaccagaactcaattaccccctgcatacactaattctttcacacgtggtgtttattaccctgacaaagttttcagatcctcagttttacattcaactcaggacttgttcttacctttcttttccaatgttacttggttccatgctatacatgtctctgggaccaatggtactaagaggtttgataaccctgtcctaccatttaatgatggtgtttattttgcttccactgagaagtctaacataataagaggctggatttttggtactactttagattcgaagacccagtccctacttattgttaataacgctactaatgttgttattaaagtctgtgaatttcaattttgtaatgatccatttttgggtgtttattaccacaaaaacaacaaaagttggatggaaagtgagttcagagtttattctagtgcgaataattgcacttttgaatatgtctctcagccttttcttatggaccttgaaggaaaacagggtaatttcaaaaatcttagggaatttgtgtttaagaatattgatggttattttaaaatatattctaagcacacgcctattaatttagtgcgtgatctcccccagggtttttcggctttagaaccattggtagatttgccaataggtattaacatcactaggtttcaaactttacttgctttacatagaagttatttgactcctggtgattcttcttcaggttggacagctggtgctgcagcttattatgtgggttatcttcaacctaggacttttctattaaaatataatgaaaatggaaccattacagatgctgtagactgtgcacttgaccctctctcagaaacaaagtgtacgttgaaatccttcactgtagaaaaaggaatctatcaaacttctaactttagagtccaaccaacagaatctattgttagatttcctaatattacaaacttgtgcccttttggtgaagtttttaacgccaccagatttgcatctgtttatgcttggaacaggaagagaatcagcaactgtgttgctgattattctgtcctatataattccgcatcattttccacttttaagtgttatggagtgtctcctactaaattaaatgatctctgctttactaatgtctatgcagattcatttgtaattagaggtgatgaagtcagacaaatcgctccagggcaaactggaaagattgctgattataattataaattaccagatgattttacaggctgcgttatagcttggaattctaacaatcttgattctaaggttggtggtaattataattacctgtatagattgtttaggaagtctaatctcaaaccttttgagagagatatttcaactgaaatctatcaggccggtagcacaccttgtaatggtgttgaaggttttaattgttactttcctttacaatcatatggtttccaacccactaatggtgttggttaccaaccatacagagtagtagtactttcttttgaacttctacatgcaccagcaactgtttgtggacctaaaaagtctactaatttggttaaaaacaaatgtgtcaatttcaacttcaatggtttaacaggcacaggtgttcttactgagtctaacaaaaagtttctgcctttccaacaatttggcagagacattgctgacactactgatgctgtccgtgatccacagacacttgagattcttgacattacaccatgttcttttggtggtgtcagtgttataacaccaggaacaaatacttctaaccaggttgctgttctttatcaggatgttaactgcacagaagtccctgttgctattcatgcagatcaacttactcctacttggcgtgtttattctacaggttctaatgtttttcaaacacgtgcaggctgtttaataggggctgaacatgtcaacaactcatatgagtgtgacatacccattggtgcaggtatatgcgctagttatcagactcagactaattctcctcggcgggcacgtagtgtagctagtcaatccatcattgcctacactatgtcacttggtgcagaaaattcagttgcttactctaataactctattgccatacccacaaattttactattagtgttaccacagaaattctaccagtgtctatgaccaagacatcagtagattgtacaatgtacatttgtggtgattcaactgaatgcagcaatcttttgttgcaatatggcagtttttgtacacaattaaaccgtgctttaactggaatagctgttgaacaagacaaaaacacccaagaagtttttgcacaagtcaaacaaatttacaaaacaccaccaattaaagattttggtggttttaatttttcacaaatattaccagatccatcaaaaccaagcaagaggtcatttattgaagatctacttttcaacaaagtgacacttgcagatgctggcttcatcaaacaatatggtgattgccttggtgatattgctgctagagacctcatttgtgcacaaaagtttaacggccttactgttttgccacctttgctcacagatgaaatgattgctcaatacacttctgcactgttagcgggtacaatcacttctggttggacctttggtgcaggtgctgcattacaaataccatttgctatgcaaatggcttataggtttaatggtattggagttacacagaatgttctctatgagaaccaaaaattgattgccaaccaatttaatagtgctattggcaaaattcaagactcactttcttccacagcaagtgcacttggaaaacttcaagatgtggtcaaccaaaatgcacaagctttaaacacgcttgttaaacaacttagctccaattttggtgcaatttcaagtgttttaaatgatatcctttcacgtcttgacaaagttgaggctgaagtgcaaattgataggttgatcacaggcagacttcaaagtttgcagacatatgtgactcaacaattaattagagctgcagaaatcagagcttctgctaatcttgctgctactaaaatgtcagagtgtgtacttggacaatcaaaaagagttgatttttgtggaaagggctatcatcttatgtccttccctcagtcagcacctcatggtgtagtcttcttgcatgtgacttatgtccctgcacaagaaaagaacttcacaactgctcctgccatttgtcatgatggaaaagcacactttcctcgtgaaggtgtctttgtttcaaatggcacacactggtttgtaacacaaaggaatttttatgaaccacaaatcattactacagacaacacatttgtgtctggtaactgtgatgttgtaataggaattgtcaacaacacagtttatgatcctttgcaacctgaattagactcattcaaggaggagttagataaatattttaagaatcatacatcaccagatgttgatttaggtgacatctctggcattaatgcttcagttgtaaacattcaaaaagaaattgaccgcctcaatgaggttgccaagaatttaaatgaatctctcatcgatctccaagaacttggaaagtatgagcagtatataaaatggccatggtacatttggctaggttttatagctggcttgattgccatagtaatggtgacaattatgctttgctgtatgaccagttgctgtagttgtctcaagggctgttgttcttgtggatcctgctgcaaatttgatgaagacgactctgagccagtgctcaaaggagtcaaattacattacacataaacgaacttatggatttgtttatgagaatcttcacaattggaactgtaactttgaagcaaggtgaaatcaaggatgctactccttcagattttgttcgcgctactgcaacgataccgatacaagcctcactccctttcggatggcttattgttggcgttgcacttcttgctgtttttcagagcgcttccaaaatcataaccctcaaaaagagatggcaactagcactctccaagggtgttcactttgtttgcaacttgctgttgttgtttgtaacagtttactcacaccttttgctcgttgctgctggccttgaagccccttttctctatctttatgctttagtctacttcttgcagagtataaactttgtaagaataataatgaggctttggctttgctggaaatgccgttccaaaaacccattactttatgatgccaactattttctttgctggcatactaattgttacgactattgtataccttacaatagtgtaacttcttcaattgtcattacttcaggtgatggcacaacaagtcctatttctgaacatgactaccagattggtggttatactgaaaaatgggaatctggagtaaaagactgtgttgtattacacagttacttcacttcagactattaccagctgtactcaactcaattgagtacagacactggtgttgaacatgttaccttcttcatctacaataaaattgttgatgagcctgaagaacatgtccaaattcacacaatcgacggttcatccggagttgttaatccagtaatggaaccaatttatgatgaaccgacgacgactactagcgtgcctttgtaagcacaagctgatgagtacgaacttatgtactcattcgtttcggaagagacaggtacgttaatagttaatagcgtacttctttttcttgctttcgtggtattcttgctagttacactagccatccttactgcgcttcgattgtgtgcgtactgctgcaatattgttaacgtgagtcttgtaaaaccttctttttacgtttactctcgtgttaaaaatctgaattcttctagagttcctgatcttctggtctaaacgaactaaatattatattagtttttctgtttggaactttaattttagccatggcagattccaacggtactattaccgttgaagagcttaaaaagctccttgaacaatggaacctagtaataggtttcctattccttacatggatttgtcttctacaatttgcctatgccaacaggaataggtttttgtatataattaagttaattttcctctggctgttatggccagtaactttagcttgttttgtgcttgctgctgtttacagaataaattggatcaccggtggaattgctatcgcaatggcttgtcttgtaggcttgatgtggctcagctacttcattgcttctttcagactgtttgcgcgtacgcgatccatgtggtcattcaatccagaaactaacattcttctcaacgtgccactccatggcactattctgaccagaccgcttctagaaagtgaactcgtaatcggagctgtgatccttcgtggacatcttcgtattgctggacaccatctaggacgctgtgacatcaaggacctgcctaaagaaatcactgttgctacatcacgaacgctttcttattacaaattgggagcttcgcagcgtgtagcaggtgactcaggttttgctgcatacagtcgctacaggattggcaactataaattaaacacagaccattccagtagcagtgacaatattgctttgcttgtacagtaagtgacaacagatgtttcatctcgttgactttcaggttactatagcagagatattactaattattatgaggacttttaaagtttccatttggaatcttgattacatcataaacctcataattaaaaatttatctaagtcactaactgagaataaatattctcaattagatgaagagcaaccaatggagattgattaaacgaacatgaaaattattcttttcttggcactgataacactcgctacttgtgagctttatcactaccaagagtgtgttagaggtacaacagtacttttaaaagaaccttgctcttctggaacatacgagggcaattcaccatttcatcctctagctgataacaaatttgcactgacttgctttagcactcaatttgcttttgcttgtcctgacggcgtaaaacacgtctatcagttacgtgccagatcagtttcacctaaactgttcatcagacaagaggaagttcaagaactttactctccaatttttcttattgttgcggcaatagtgtttataacactttgcttcacactcaaaagaaagacagaatgattgaactttcattaattgacttctatttgtgctttttagcctttctgctattccttgttttaattatgcttattatcttttggttctcacttgaactgcaagatcataatgaaacttgtcacgcctaaacgaacatgaaatttcttgttttcttaggaatcatcacaactgtagctgcatttcaccaagaatgtagtttacagtcatgtactcaacatcaaccatatgtagttgatgacccgtgtcctattcacttctattctaaatggtatattagagtaggagctagaaaatcagcacctttaattgaattgtgcgtggatgaggctggttctaaatcacccattcagtacatcgatatcggtaattatacagtttcctgtttaccttttacaattaattgccaggaacctaaattgggtagtcttgtagtgcgttgttcgttctatgaagactttttagagtatcatgacgttcgtgttgttttagatttcatctaaacgaacaaactaaaatgtctgataatggaccccaaaatcagcgaaatgcaccccgcattacgtttggtggaccctcagattcaactggcagtaaccagaatggagaacgcagtggggcgcgatcaaaacaacgtcggccccaaggtttacccaataatactgcgtcttggttcaccgctctcactcaacatggcaaggaagaccttaaattccctcgaggacaaggcgttccaattaacaccaatagcagtccagatgaccaaattggctactaccgaagagctaccagacgaattcgtggtggtgacggtaaaatgaaagatctcagtccaagatggtatttctactacctaggaactgggccagaagctggacttccctatggtgctaacaaagacggcatcatatgggttgcaactgagggagccttgaatacaccaaaagatcacattggcacccgcaatcctgctaacaatgctgcaatcgtgctacaacttcctcaaggaacaacattgccaaaaggcttctacgcagaagggagcagaggcggcagtcaagcctcttctcgttcctcatcacgtagtcgcaacagttcaagaaattcaactccaggcagcagtaggggaacttctcctgctagaatggctggcaatggcggtgatgctgctcttgctttgctgctgcttgacagattgaaccagcttgagagcaaaatgtctggtaaaggccaacaacaacaaggccaaactgtcactaagaaatctgctgctgaggcttctaagaagcctcggcaaaaacgtactgccactaaagcatacaatgtaacacaagctttcggcagacgtggtccagaacaaacccaaggaaattttggggaccaggaactaatcagacaaggaactgattacaaacattggccgcaaattgcacaatttgcccccagcgcttcagcgttcttcggaatgtcgcgcattggcatggaagtcacaccttcgggaacgtggttgacctacacaggtgccatcaaattggatgacaaagatccaaatttcaaagatcaagtcattttgctgaataagcatattgacgcatacaaaacattcccaccaacagagcctaaaaaggacaaaaagaagaaggctgatgaaactcaagccttaccgcagagacagaagaaacagcaaactgtgactcttcttcctgctgcagatttggatgatttctccaaacaattgcaacaatccatgagcagtgctgactcaactcaggcctaaactcatgcagaccacacaaggcagatgggctatataaacgttttcgcttttccgtttacgatatatagtctactcttgtgcagaatgaattctcgtaactacatagcacaagtagatgtagttaactttaatctcacatagcaatctttaatcagtgtgtaacattagggaggacttgaaagagccaccacattttcaccgaggccacgcggagtacgatcgagtgtacagtgaacaatgctagggagagctgcctatatggaagagccctaatgtgtaaaattaattttagtagtgctatccccatgtgattttaatagcttcttaggagaatgacaaaaaaaaaaaaaaaaaaaaaaaaaaaaaaaaaaaaaaaaaaaaaaaaaaaaaaaaaaagggtcggcatggcatctccacctcctcgcggtccgacctgggcatccgaaggaggacgcacgtccactcggatggctaagggagcagcacactggcggccgttactagggccgcgcccttcccaacagttgcgcagcctgaatggcgaatggagatccaatttttaagtgtataatgtgttaaactactgattctaattgtttgtgtattttagattcacagtcccaaggctcatttcaggcccctcagtcctcacagtctgttcatgatcataatcagccataccacatttgtagaggttttacttgctttaaaaaacctcccacacctccccctgaacctgaaacataaaatgaatgcaattgttgttgttaacttgtttattgcagcttataatggttacaaataaagcaatagcatcacaaatttcacaaataaagcatttttttcactgcattctagttgtggtttgtccaaactcatcaatgtatcttaaagcttgagtattctatagtctcacctaaatagcttggcgtaatcatggtcatagctgtttcctgtgtgaaattgttatccgctcacaattccacacaacatacgagccggaagcataaagtgtaaagcctggggtgcctaatgagtgagctaactcacattaattgcgttgcgctcactgcccgctttccagtcgggaaacctgtcgtgccagctgcattaatgaatcggccaacgcgaaccccttgcggccgcccgggccgtcgaccaattctcatgtttgacagcttatcatcgaatttctgccattcatccgcttattatcacttattcaggcgtagcaaccaggcgtttaagggcaccaataactgccttaaaaaaattacgccccgccctgccactcatcgcagtactgttgtaattcattaagcattctgccgacatggaagccatcacaaacggcatgatgaacctgaatcgccagcggcatcagcaccttgtcgccttgcgtataatatttgcccatggtgaaaacgggggcgaagaagttgtccatattggccacgtttaaatcaaaactggtgaaactcacccagggattggctgagacgaaaaacatattctcaataaaccctttagggaaataggccaggttttcaccgtaacacgccacatcttgcgaatatatgtgtagaaactgccggaaatcgtcgtggtattcactccagagcgatgaaaacgtttcagtttgctcatggaaaacggtgtaacaagggtgaacactatcccatatcaccagctcaccgtctttcattgccatacgaaattccggatgagcattcatcaggcgggcaagaatgtgaataaaggccggataaaacttgtgcttatttttctttacggtctttaaaaaggccgtaatatccagctgaacggtctggttataggtacattgagcaactgactgaaatgcctcaaaatgttctttacgatgccattgggatatatcaacggtggtatatccagtgatttttttctccattttagcttccttagctcctgaaaatctcgataactcaaaaaatacgcccggtagtgatcttatttcattatggtgaaagttggaacctcttacgtgccgatcaacgtctcattttcgccaaaagttggcccagggcttcccggtatcaacagggacaccaggatttatttattctgcgaagtgatcttccgtcacaggtatttattcgcgataagctcatggagcggcgtaaccgtcgcacaggaaggacagagaaagcgcggatctgggaagtgacggacagaacggtcaggacctggattggggaggcggttgccgccgctgctgctgacggtgtgacgttctctgttccggtcacaccacatacgttccgccattcctatgcgatgcacatgctgtatgccggtataccgctgaaagttctgcaaagcctgatgggacataagtccatcagttcaacggaagtctacacgaaggtttttgcgctggatgtggctgcccggcaccgggtgcagtttgcgatgccggagtctgatgcggttgcgatgctgaaacaattatcctgagaataaatgccttggcctttatatggaaatgtggaactgagtggatatgctgtttttgtctgttaaacagagaagctggctgttatccactgagaagcgaacgaaacagtcgggaaaatctcccattatcgtagagatccgcattattaatctcaggagcctgtgtagcgtttataggaagtagtgttctgtcatgatgcctgcaagcggtaacgaaaacgatttgaatatgccttcaggaacaatagaaatcttcgtgcggtgttacgttgaagtggagcggattatgtcagcaatggacagaacaacctaatgaacacagaaccatgatgtggtctgtccttttacagccagtagtgctcgccgcagtcgagcgacagggcgaagccctcggctggttgccctcgccgctgggctggcggccgtctatggccctgcaaacgcgccagaaacgccgtcgaagccgtgtgcgagacaccgcggccggccgccggcgttgtggatacctcgcggaaaacttggccctcactgacagatgaggggcggacgttgacacttgaggggccgactcacccggcgcggcgttgacagatgaggggcaggctcgatttcggccggcgacgtggagctggccagcctcgcaaatcggcgaaaacgcctgattttacgcgagtttcccacagatgatgtggacaagcctggggataagtgccctgcggtattgacacttgaggggcgcgactactgacagatgaggggcgcgatccttgacacttgaggggcagagtgctgacagatgaggggcgcacctattgacatttgaggggctgtccacaggcagaaaatccagcatttgcaagggtttccgcccgtttttcggccaccgctaacctgtcttttaacctgcttttaaaccaatatttataaaccttgtttttaaccagggctgcgccctgtgcgcgtgaccgcgcacgccgaaggggggtgcccccccttctcgaaccctcccggtcgagtgagcgaggaagcaccagggaacagcacttatatattctgcttacacacgatgcctgaaaaaacttcccttggggttatccacttatccacggggatatttttataattattttttttatagtttttagatcttcttttttagagcgccttgtaggcctttatccatgctggttctagagaaggtgttgtgacaaattgccctttcagtgtgacaaatcaccctcaaatgacagtcctgtctgtgacaaattgcccttaaccctgtgacaaattgccctcagaagaagctgttttttcacaaagttatccctgcttattgactcttttttatttagtgtgacaatctaaaaacttgtcacacttcacatggatctgtcatggcggaaacagcggttatcaatcacaagaaacgtaaaaatagcccgcgaatcgtccagtcaaacgacctcactgaggcggcatatagtctctcccgggatcaaaaacgtatgctgtatctgttcgttgaccagatcagaaaatctgatggcaccctacaggaacatgacggtatctgcgagatccatgttgctaaatatgctgaaatattcggattgacctctgcggaagccagtaaggatatacggcaggcattgaagagtttcgcggggaaggaagtggttttttatcgccctgaagaggatgccggcgatgaaaaaggctatgaatcttttccttggtttatcaaacgtgcgcacagtccatccagagggctttacagtgtacatatcaacccatatctcattcccttctttatcgggttacagaaccggtttacgcagtttcggcttagtgaaacaaaagaaatcaccaatccgtatgccatgcgtttatacgaatccctgtgtcagtatcgtaagccggatggctcaggcatcgtctctctgaaaatcgactggatcatagagcgttaccagctgcctcaaagttaccagcgtatgcctgacttccgccgccgcttcctgcaggtctgtgttaatgagatcaacagcagaactccaatgcgcctctcatacattgagaaaaagaaaggccgccagacgactcatatcgtattttccttccgcgatatcacttccatgacgacaggatagtctgagggttatctgtcacagatttgagggtggttcgtcacatttgttctgacctactgagggtaatttgtcacagttttgctgtttccttcagcctgcatggattttctcatactttttgaactgtaatttttaaggaagccaaatttgagggcagtttgtcacagttgatttccttctctttcccttcgtcatgtgacctgatatcgggggttagttcgtcatcattgatgagggttgattatcacagtttattactctgaattggctatccgcgtgtgtacctctacctggagtttttcccacggtggatatttcttcttgcgctgagcgtaagagctatctgacagaacagttcttctttgcttcctcgccagttcgctcgctatgctcggttacacggctgcggcg

SEQ ID NO: 25 - DNA, 35283 bp, Artificial Sequence
  Clone pCCI-4K-SARS-CoV-2-WWDDW. Based on SARS-CoV-2.
gatgtgctgcaaggcgattaagttgggtaacgccagggttttcccagtcacgacgttgtaaaacgacggccagtgaattgtaatacgactcactatagggcgaattctagttattaatagtaatcaattacggggtcattagttcatagcccatatatggagttccgcgttacataacttacggtaaatggcccgcctggctgaccgcccaacgacccccgcccattgacgtcaataatgacgtatgttcccatagtaacgccaatagggactttccattgacgtcaatgggtggagtatttacggtaaactgcccacttggcagtacatcaagtgtatcatatgccaagtacgccccctattgacgtcaatgacggtaaatggcccgcctggcattatgcccagtacatgaccttatgggactttcctacttggcagtacatctacgtattagtcatcgctattaccatggtgatgcggttttggcagtacatcaatgggcgtggatagcggtttgactcacggggatttccaagtctccaccccattgacgtcaatgggagtttgttttggcaccaaaatcaacgggactttccaaaatgtcgtaacaactccgccccattgacgcaaatgggcggtaggcgtgtacggtgggaggtctatataagcagagctggtttagtgaaccgtattaaaggtttataccttcccaggtaacaaaccaaccaactttcgatctcttgtagatctgttctctaaacgaactttaaaatctgtgtggctgtcactcggctgcatgcttagtgcactcacgcagtataattaataactaattactgtcgttgacaggacacgagtaactcgtctatcttctgcaggctgcttacggtttcgtccgtgttgcagccgatcatcagcacatctaggtttcgtccgggtgtgaccgaaaggtaagatggagagccttgtccctggtttcaacgagaaaacacacgtccaactcagtttgcctgttttacaggttcgcgacgtgctcgtacgtggctttggagactccgtggaggaggtcttatcagaggcacgtcaacatcttaaagatggcacttgtggcttagtagaagttgaaaaaggcgttttgcctcaacttgaacagccctatgtgttcatcaaacgttcggatgctcgaactgcacctcatggtcatgttatggttgagctggtagcagaactcgaaggcattcagtacggtcgtagtggtgagacacttggtgtccttgtccctcatgtgggcgaaataccagtggcttaccgcaaggttcttcttcgtaagaacggtaataaaggagctggtggccatagttacggcgccgatctaaagtcatttgacttaggcgacgagcttggcactgatccttatgaagattttcaagaaaactggaacactaaacatagcagtggtgttacccgtgaactcatgcgtgagcttaacggaggggcatacactcgctatgtcgataacaacttctgtggccctgatggctaccctcttgagtgcattaaagaccttctagcacgtgctggtaaagcttcatgcactttgtccgaacaactggactttattgacactaagaggggtgtatactgctgccgtgaacatgagcatgaaattgcttggtacacggaacgttctgaaaagagctatgaattgcagacaccttttgaaattaaattggcaaagaaatttgacaccttcaatggggaatgtccaaattttgtatttcccttaaattccataatcaagactattcaaccaagggttgaaaagaaaaagcttgatggctttatgggtagaattcgatctgtctatccagttgcgtcaccaaatgaatgcaaccaaatgtgcctttcaactctcatgaagtgtgatcattgtggtgaaacttcatggcagacgggcgattttgttaaagccacttgcgaattttgtggcactgagaatttgactaaagaaggtgccactacttgtggttacttaccccaaaatgctgttgttaaaatttattgtccagcatgtcacaattcagaagtaggacctgagcatagtcttgccgaataccataatgaatctggcttgaaaaccattcttcgtaagggtggtcgcactattgcctttggaggctgtgtgttctcttatgttggttgccataacaagtgtgcctattgggtcccacgtgctagcgctaacataggttgtaaccatacaggtgttgttggagaaggttccgaaggtcttaatgacaaccttcttgaaatactccaaaaagagaaagtcaacatcaatattgttggtgactttaaacttaatgaagagatcgccattattttggcatctttttctgcttccacaagtgcttttgtggaaactgtgaaaggtttggattataaagcattcaaacaaattgttgaatcctgtggtaattttaaagttacaaaaggaaaagctaaaaaaggtgcctggaatattggtgaacagaaatcaatactgagtcctctttatgcatttgcatcagaggctgctcgtgttgtacgatcaattttctcccgcactcttgaaactgctcaaaattctgtgcgtgttttacagaaggccgctataacaatactagatggaatttcacagtattcactgagactcattgatgctatgatgttcacatctgatttggctactaacaatctagttgtaatggcctacattacaggtggtgttgttcagttgacttcgcagtggctaactaacatctttggcactgtttatgaaaaactcaaacccgtccttgattggcttgaagagaagtttaaggaaggtgtagagtttcttagagacggttgggaaattgttaaatttatctcaacctgtgcttgtgaaattgtcggtggacaaattgtcacctgtgcaaaggaaattaaggagagtgttcagacattctttaagcttgtaaataaatttttggctttgtgtgctgactctatcattattggtggagctaaacttaaagccttgaatttaggtgaaacatttgtcacgcactcaaagggattgtacagaaagtgtgttaaatccagagaagaaactggcctactcatgcctctaaaagccccaaaagaaattatcttcttagagggagaaacacttcccacagaagtgttaacagaggaagttgtcttgaaaactggtgatttacaaccattagaacaacctactagtgaagctgttgaagctccattggttggtacaccagtttgtattaacgggcttatgttgctcgaaatcaaagacacagaaaagtactgtgcccttgcacctaatatgatggtaacaaacaataccttcacactcaaaggcggtgcaccaacaaaggttacttttggtgatgacactgtgatagaagtgcaaggttacaagagtgtgaatatcacttttgaacttgatgaaaggattgataaagtacttaatgagaagtgctctgcctatacagttgaactcggtacagaagtaaatgagttcgcctgtgttgtggcagatgctgtcataaaaactttgcaaccagtatctgaattacttacaccactgggcattgatttagatgagtggagtatggctacatactacttatttgatgagtctggtgagtttaaattggcttcacatatgtattgttctttctaccctccagatgaggatgaagaagaaggtgattgtgaagaagaagagtttgagccatcaactcaatatgagtatggtactgaagatgattaccaaggtaaacctttggaatttggtgccacttctgctgctcttcaacctgaagaagagcaagaagaagattggttagatgatgatagtcaacaaactgttggtcaacaagacggcagtgaggacaatcagacaactactattcaaacaattgttgaggttcaacctcaattagagatggaacttacaccagttgttcagactattgaagtgaatagttttagtggttatttaaaacttactgacaatgtatacattaaaaatgcagacattgtggaagaagctaaaaaggtaaaaccaacagtggttgttaatgcagccaatgtttaccttaaacatggaggaggtgttgcaggagccttaaataaggctactaacaatgccatgcaagttgaatctgatgattacatagctactaatggaccacttaaagtgggtggtagttgtgttttaagcggacacaatcttgctaaacactgtcttcatgttgtcggcccaaatgttaacaaaggtgaagacattcaacttcttaagagtgcttatgaaaattttaatcagcacgaagttctacttgcaccattattatcagctggtatttttggtgctgaccctatacattctttaagagtttgtgtagatactgttcgcacaaatgtctacttagctgtctttgataaaaatctctatgacaaacttgtttcaagctttttggaaatgaagagtgaaaagcaagttgaacaaaagatcgctgagattcctaaagaggaagttaagccatttataactgaaagtaaaccttcagttgaacagagaaaacaagatgataagaaaatcaaagcttgtgttgaagaagttacaacaactctggaagaaactaagttcctcacagaaaacttgttactttatattgacattaatggcaatcttcatccagattctgccactcttgttagtgacattgacatcactttcttaaagaaagatgctccatatatagtgggtgatgttgttcaagagggtgttttaactgctgtggttatacctactaaaaaggctggtggcactactgaaatgctagcgaaagctttgagaaaagtgccaacagacaattatataaccacttacccgggtcagggtttaaatggttacactgtagaggaggcaaagacagtgcttaaaaagtgtaaaagtgccttttacattctaccatctattatctctaatgagaagcaagaaattcttggaactgtttcttggaatttgcgagaaatgcttgcacatgcagaagaaacacgcaaattaatgcctgtctgtgtggaaactaaagccatagtttcaactatacagcgtaaatataagggtattaaaatacaagagggtgtggttgattatggtgctagattttacttttacaccagtaaaacaactgtagcgtcacttatcaacacacttaacgatctaaatgaaactcttgttacaatgccacttggctatgtaacacatggcttaaatttggaagaagctgctcggtatatgagatctctcaaagtgccagctacagtttctgtttcttcacctgatgctgttacagcgtataatggttatcttacttcttcttctaaaacacctgaagaacattttattgaaaccatctcacttgctggttcctataaagattggtcctattctggacaatctacacaactaggtatagaatttcttaagagaggtgataaaagtgtatattacactagtaatcctaccacattccacctagatggtgaagttatcacctttgacaatcttaagacacttctttctttgagagaagtgaggactattaaggtgtttacaacagtagacaacattaacctccacacgcaagttgtggacatgtcaatgacatatggacaacagtttggtccaacttatttggatggagctgatgttactaaaataaaacctcataattcacatgaaggtaaaacattttatgttttacctaatgatgacactctacgtgttgaggcttttgagtactaccacacaactgatcctagttttctgggtaggtacatgtcagcattaaatcacactaaaaagtggaaatacccacaagttaatggtttaacttctattaaatgggcagataacaactgttatcttgccactgcattgttaacactccaacaaatagagttgaagtttaatccacctgctctacaagatgcttattacagagcaagggctggtgaagctgctaacttttgtgcacttatcttagcctactgtaataagacagtaggtgagttaggtgatgttagagaaacaatgagttacttgtttcaacatgccaatttagattcttgcaaaagagtcttgaacgtggtgtgtaaaacttgtggacaacagcagacaacccttaagggtgtagaagctgttatgtacatgggcacactttcttatgaacaatttaagaaaggtgttcagataccttgtacgtgtggtaaacaagctacaaaatatctagtacaacaggagtcaccttttgttatgatgtcagcaccacctgctcagtatgaacttaagcatggtacatttacttgtgctagtgagtacactggtaattaccagtgtggtcactataaacatataacttctaaagaaactttgtattgcatagacggtgctttacttacaaagtcctcagaatacaaaggtcctattacggatgttttctacaaagaaaacagttacacaacaaccataaaaccagttacttataaattggatggtgttgtttgtacagaaattgaccctaagttggacaattattataagaaagacaattcttatttcacagagcaaccaattgatcttgtaccaaaccaaccatatccaaacgcaagcttcgataattttaagtttgtatgtgataatatcaaatttgctgatgatttaaaccagttaactggttataagaaacctgcttcaagagagcttaaagttacatttttccctgacttaaatggtgatgtggtggctattgattataaacactacacaccctcttttaagaaaggagctaaattgttacataaacctattgtttggcatgttaacaatgcaactaataaagccacgtataaaccaaatacctggtgtatacgttgtctttggagcacaaaaccagttgaaacatcaaattcgtttgatgtactgaagtcagaggacgcgcagggaatggataatcttgcctgcgaagatctaaaaccagtctctgaagaagtagtggaaaatcctaccatacagaaagacgttcttgagtgtaatgtgaaaactaccgaagttgtaggagacattatacttaaaccagcaaataatagtttaaaaattacagaagaggttggccacacagatctaatggctgcttatgtagacaattctagtcttactattaagaaacctaatgaattatctagagtattaggtttgaaaacccttgctactcatggtttagctgctgttaatagtgtcccttgggatactatagctaattatgctaagccttttcttaacaaagttgttagtacaactactaacatagttacacggtgtttaaaccgtgtttgtactaattatatgccttatttctttactttattgctacaattgtgtacttttactagaagtacaaattctagaattaaagcatctatgccgactactatagcaaagaatactgttaagagtgtcggtaaattttgtctagaggcttcatttaattatttgaagtcacctaatttttctaaactgataaatattataatttggtttttactattaagtgtttgcctaggttcgttaatatattcgacggcggcgttaggtgtattaatgtcgaatttaggtatgccgtcgtattgtacgggttatcgtgaaggttatttaaattcgacgaatgtaacgatagcgacgtattgtacgggttcgataccgtgttcggtatgtctatcgggtttagattcgttagatacgtatccgtcgttagaaacgatacaaataacgatatcgtcgtttaaatgggatttaacggcgtttggtttagtagcggaatggtttttagcgtatatactatttacgcgatttttttatgtactaggtttagcggcgataatgcaattatttttttcgtattttgcggtacattttatttcgaattcgtggctaatgtggttaataataaatctagtacaaatggcgccgatatcggcgatggtacgtatgtatatattttttgcgtcgttttattatgtatggaaatcgtatgtacatgtagtagatggttgtaattcgtcgacgtgtatgatgtgttataaacgtaatcgtgcgacgcgagtagaatgtacgacgatagtaaatggtgtacgtcgttcgttttatgtatatgcgaatggtggtaaaggtttttgtaaactacataattggaattgtgtaaattgtgatacgttttgtgcgggttcgacgtttatatcggatgaagtagcgcgtgatttatcgctacaatttaaacgtccgataaatccgacggatcaatcgtcgtatatagtagattcggtaacggtaaaaaatggttcgatacatctatattttgataaagcgggtcaaaaaacgtatgaacgtcattcgctatcgcattttgtaaatttagataatctacgtgcgaataatacgaaaggttcgttaccgataaatgtaatagtatttgatggtaaatcgaaatgtgaagaatcgtcggcgaaatcggcgtcggtatattattcgcaactaatgtgtcaaccgatactattactagatcaagcgttagtatcggatgtaggtgattcggcggaagtagcggtaaaaatgtttgatgcgtatgtaaatacgttttcgtcgacgtttaatgtaccgatggaaaaactaaaaacgctagtagcgacggcggaagcggaactagcgaaaaatgtatctttagataatgtattatcgacgtttatatcggcggcgcgtcaaggttttgtagattcggatgtagaaacgaaagatgtagtagaatgtctaaaattatcgcatcaatcggatatagaagtaacgggtgattcgtgtaataattatatgctaacgtataataaagtagaaaatatgacgccgcgtgatctaggtgcgtgtatagattgttcggcgcgtcatataaatgcgcaagtagcgaaatcgcataatatagcgttaatatggaatgtaaaagattttatgtcgttatcggaacaactacgtaaacaaatacgttcggcggcgaaaaaaaataatttaccgtttaaattaacgtgtgcgacgacgcgacaagtagtaaatgtagtaacgacgaaaatagcgctaaaaggtggtaaaatagtaaataattggttaaaacaattaattaaagtaacgctagtatttctatttgtagcggcgatattttatttaataacgccggtacatgtaatgtcgaaacatacggatttttcgtcggaaataataggttataaagcgatagatggtggtgtaactcgtgatatagcgtcgacggatacgtgttttgcgaataaacatgcggattttgatacgtggttttcgcaacgtggtggttcgtatacgaatgataaagcgtgtccgttaatagcggcggtaataacacgtgaagtaggttttgtagtaccgggtttaccgggtacgatattacgtacgacgaatggtgattttttacattttttaccgcgtgtattttcggcggtaggtaatatatgttatacgccgtcgaaactaatagaatatacggattttgcgacgtcggcgtgtgtattagcggcggaatgtacgatatttaaagatgcgtcgggtaaaccggtaccgtattgttatgatacgaatgtactagaaggttcggtagcgtatgaatcgttacgcccggatacacgttatgtactaatggatggttcgataatacaatttccgaatacgtatctagaaggttcggtacgtgtagtaacgacgtttgattcggaatattgtcgtcatggtacgtgtgaacgttcggaagcgggtgtatgtgtatcgacgtcggggcgttgggtactaaataatgattattatcgttcgttaccgggtgtattctgtggtgtagatgcggtaaatttactaacgaatatgtttacgccgctgatacaaccgataggtgcgttagatatatcggcgtcgatagtagcgggtggtatagtagcgatagtagtaacgtgtctagcgtattattttatgcgttttcgtcgtgcgtttggtgaatattcgcatgtagtagcgtttaatacgttactatttctaatgtcttttacagtactatgtttaacgccggtatattcttttttaccgggtgtatattcggtaatatatttatatttaacgttttatctaacgaatgatgtatcgtttttagcgcatatacaatggatggtaatgtttacgccgttagtaccgttttggataacaatagcgtatataatatgtatatcgacgaaacatttttattggtttttttcgaattatctgaaacgtcgtgtagtatttaatggtgtatctttttcgacgtttgaagaagcggcgctatgtacatttttattaaataaagaaatgtatctaaaattacgttcggatgtactattaccgctaacgcaatataatcgttatttagcgctatataataaatataaatatttttcgggtgcgatggatacgacgtcgtatcgtgaagcggcgtgttgtcatctagcgaaagcgctaaatgatttttcgaattcgggttcggatgtactatatcaaccgccgcaaacgtcgataacgtcggcggtattacaatcgggttttcgtaaaatggcgtttccgtcgggtaaagtagaaggttgtatggtacaagtaacgtgtggtacgacgacgctaaatggtctatggctagatgatgtagtatattgtccgcgtcatgtaatatgtacgtcggaagatatgctaaatccgaattatgaagatttactaatacgtaaatcgaatcataattttttagtacaagcgggtaatgtacaactacgtgtaataggtcattcgatgcaaaattgtgtactaaaactaaaagtagatacggcgaatccgaaaacaccgaaatataaatttgtacgtatacaaccgggtcaaacgttttcggtattagcgtgttataatggttctccgtcgggtgtatatcaatgtgcgatgcgtccgaattttacgattaaaggttcgtttctaaatggttcgtgtggttcggtaggttttaatatagattatgattgtgtatcgttttgttatatgcatcatatggaattaccgacgggtgtacatgcgggtacggatttagaaggtaatttttatggtccgtttgtagatcgtcaaacagcgcaagcggcgggtacggatacgacgattacggtaaatgtattagcgtggttatatgcggcggtaataaatggtgatcgttggtttctaaatcgttttacgacgacgctaaatgattttaatctagtagcgatgaaatataattatgaaccgctgacacaagatcatgtagatatactaggtccgctatcggcgcaaacgggtatagcggtattagatatgtgtgcgtcgttaaaagaattactacaaaatggtatgaatggtcgtacgatattaggttcggcgttattagaagatgaatttacgccgtttgatgtagtacgtcaatgttcgggtgtaacgtttcaatcggcggtaaaacgtacgataaaaggtacgcatcattggttattactaacgatattaacgtcgctattagtattagtacaatcgacgcaatggtcgttatttttttttttatatgaaaatgcgtttttaccgtttgcgatgggtataatagcgatgtcggcgtttgcgatgatgtttgtaaaacataagcatgcatttctctgtttgtttttgttaccttctcttgccactgtagcttattttaatatggtctatatgcctgctagttgggtgatgcgtattatgacatggttggatatggttgatactagtttgtctggttttaagctaaaagactgtgttatgtatgcatcagctgtagtgttactaatccttatgacagcaagaactgtgtatgatgatggtgctaggagagtgtggacacttatgaatgtcttgacactcgtttataaagtttattatggtaatgctttagatcaagccatttccatgtgggctcttataatctctgttacttctaactactcaggtgtagttacaactgtcatgtttttggccagaggtattgtttttatgtgtgttgagtattgccctattttcttcataactggtaatacacttcagtgtataatgctagtttattgtttcttaggctatttttgtacttgttactttggcctcttttgtttactcaaccgctactttagactgactcttggtgtttatgattacttagtttctacacaggagtttagatatatgaattcacagggactactcccacccaagaatagcatagatgccttcaaactcaacattaaattgttgggtgttggtggcaaaccttgtatcaaagtagccactgtacagtctaaaatgtcagatgtaaagtgcacatcagtagtcttactctcagttttgcaacaactcagagtagaatcatcatctaaattgtgggctcaatgtgtccagttacacaatgacattctcttagctaaagatactactgaagcctttgaaaaaatggtttcactactttctgttttgctttccatgcagggtgctgtagacataaacaagctttgtgaagaaatgctggacaacagggcaaccttacaagctatagcctcagagtttagttcccttccatcatatgcagcttttgctactgctcaagaagcttatgagcaggctgttgctaatggtgattctgaagttgttcttaaaaagttgaagaagtctttgaatgtggctaaatctgaatttgaccgtgatgcagccatgcaacgtaagttggaaaagatggctgatcaagctatgacccaaatgtataaacaggctagatctgaggacaagagggcaaaagttactagtgctatgcagacaatgcttttcactatgcttagaaagttggataatgatgcactcaacaacattatcaacaatgcaagagatggttgtgttcccttgaacataatacctcttacaacagcagccaaactaatggttgtcataccagactataacacatataaaaatacgtgtgatggtacaacatttacttatgcatcagcattgtgggaaatccaacaggttgtagatgcagatagtaaaattgttcaacttagtgaaattagtatggacaattcacctaatttagcatggcctcttattgtaacagctttaagggccaattctgctgtcaaattacagaataatgagcttagtcctgttgcactacgacagatgtcttgtgctgccggtactacacaaactgcttgcactgatgacaatgcgttagcttactacaacacaacaaagggaggtaggtttgtacttgcactgttatccgatttacaggatttgaaatgggctagattccctaagagtgatggaactggtactatctatacagaactggaaccaccttgtaggtttgttacagacacacctaaaggtcctaaagtgaagtatttatactttattaaaggattaaacaacctaaatagaggtatggtacttggtagtttagctgccacagtacgtctacaagctggtaatgcaacagaagtgcctgccaattcaactgtattatctttctgtgcttttgctgtagatgctgctaaagcttacaaagattatctagctagtgggggacaaccaatcactaattgtgttaagatgttgtgtacacacactggtactggtcaggcaataacagttacaccggaagccaatatggatcaagaatcctttggtggtgcatcgtgttgtctgtactgccgttgccacatagatcatccaaatcctaaaggattttgtgacttaaaaggtaagtatgtacaaatacctacaacttgtgctaatgaccctgtgggttttacacttaaaaacacagtctgtaccgtctgcggtatgtggaaaggttatggctgtagttgtgatcaactccgcgaacccatgcttcagtcagctgatgcacaatcgtttttaaacgggtttgcggtgtaagtgcagcccgtcttacaccgtgcggcacaggcactagtactgatgtcgtatacagggcttttgacatctacaatgataaagtagctggttttgctaaattcctaaaaactaattgttgtcgcttccaagaaaaggacgaagatgacaatttaattgattcttactttgtagttaagagacacactttctctaactaccaacatgaagaaacaatttataatttacttaaggattgtccagctgttgctaaacatgacttctttaagtttagaatagacggtgacatggtaccacatatatcacgtcaacgtcttactaaatacacaatggcagacctcgtctatgctttaaggcattttgatgaaggtaattgtgacacattaaaagaaatacttgtcacatacaattgttgtgatgatgattatttcaataaaaaggactggtatgattttgtagaaaacccagatatattacgcgtatacgccaacttaggtgaacgtgtacgccaagctttgttaaaaacagtacaattctgtgatgccatgcgaaatgctggtattgttggtgtactgacattagataatcaagatctcaatggtaactggtatgatttcggtgatttcatacaaaccacgccaggtagtggagttcctgttgtagattcttattattcattgttaatgcctatattaaccttgaccagggctttaactgcagagtcacatgttgacactgacttaacaaagccttacattaagtgggatttgttaaaatatgacttcacggaagagaggttaaaactctttgaccgttattttaaatattgggatcagacataccacccaaattgtgttaactgtttggatgacagatgcattctgcattgtgcaaactttaatgttttattctctacagtgttcccacctacaagttttggaccactagtgagaaaaatatttgttgatggtgttccatttgtagtttcaactggataccacttcagagagctaggtgttgtacataatcaggatgtaaacttacatagctctagacttagttttaaggaattacttgtgtatgctgctgaccctgctatgcacgctgcttctggtaatctattactagataaacgcactacgtgcttttcagtagctgcacttactaacaatgttgcttttcaaactgtcaaacccggtaattttaacaaagacttctatgactttgctgtgtctaagggtttctttaaggaaggaagttctgttgaattaaaacacttcttctttgctcaggatggtaatgctgctatcagcgattatgactactatcgttataatctaccaacaatgtgtgatatcagacaactactatttgtagttgaagttgttgataagtactttgattgttacgatggtggctgtattaatgctaaccaagtcatcgtcaacaacctagacaaatcagctggttttccatttaataaatggggtaaggctagactttattatgattcaatgagttatgaggatcaagatgcacttttcgcatatacaaaacgtaatgtcatccctactataactcaaatgaatcttaagtatgccattagtgcaaagaatagagctcgcaccgtagctggtgtctctatctgtagtactatgaccaatagacagtttcatcaaaaattattgaaatcaatagccgccactagaggagctactgtagtaattggaacaagcaaattctatggtggttggcacaacatgttaaaaactgtttatagtgatgtagaaaaccctcaccttatgggttgggattatcctaaatgtgatagagccatgcctaacatgcttagaattatggcctcacttgttcttgctcgcaaacatacaacgtgttgtagcttgtcacaccgtttctatagattagctaatgagtgtgctcaagtattgagtgaaatggtcatgtgtggcggttcactatatgttaaaccaggtggaacctcatcaggagatgccacaactgcttatgctaatagtgtttttaacatttgtcaagctgtcacggccaatgttaatgcacttttatctactgatggtaacaaaattgccgataagtatgtccgcaatttacaacacagactttatgagtgtctctatagaaatagagatgttgacacagactttgtgaatgagttttacgcatatttgcgtaaacatttctcaatgatgatactctctgacgatgctgttgtgtgtttcaatagcacttatgcatctcaaggtctagtggctagcataaagaactttaagtcagttctttattatcaaaacaatgtttttatgtctgaagcaaaatgttggactgagactgaccttactaaaggacctcatgaattttgctctcaacatacaatgctagttaaacagggtgatgattatgtgtaccttccttacccagatccatcaagaatcctaggggccggctgttttgtagatgatatcgtaaaaacagatggtacacttatgattgaacggttcgtgtctttagctatagatgcttacccacttactaaacatcctaatcaggagtatgctgatgtctttcatttgtacttacaatacataagaaagctacatgatgagttaacaggacacatgttagacatgtattctgttatgcttactaatgataacacttcaaggtattgggaacctgagttttatgaggctatgtacacaccgcatacagtcttacaggctgttggggcttgtgttctttgcaattcacagacttcattaagatgtggtgcttgcatacgtagaccattcttatgttgtaaatgctgttacgaccatgtcatatcaacatcacataaattagtcttgtctgttaatccgtatgtttgcaatgctccaggttgtgatgtcacagatgtgactcaactttacttaggaggtatgagctattattgtaaatcacataaaccacccattagttttccattgtgtgctaatggacaagtttttggtttatataaaaatacatgtgttggtagcgataatgttactgactttaatgcaattgcaacatgtgactggacaaatgctggtgattacattttagctaacacctgtactgaaagactcaagctttttgcagcagaaacgctcaaagctactgaggagacatttaaactgtcttatggtattgctactgtacgtgaagtgctgtctgacagagaattacatctttcatgggaagttggtaaacctagaccaccacttaaccgaaattatgtctttactggttatcgtgtaactaaaaacagtaaagtacaaataggagagtacacctttgaaaaaggtgactatggtgatgctgttgtttaccgaggtacaacaacttacaaattaaatgttggtgattattttgtgctgacatcacatacagtaatgccattaagtgcacctacactagtgccacaagagcactatgttagaattactggcttatacccaacactcaatatctcagatgagttttctagcaatgttgcaaattatcaaaaggttggtatgcaaaagtattctacactccagggaccacctggtactggtaagagtcattttgctattggcctagctctctactacccttctgctcgcatagtgtatacagcttgctctcatgccgctgttgatgcactatgtgagaaggcattaaaatatttgcctatagataaatgtagtagaattatacctgcacgtgctcgtgtagagtgttttgataaattcaaagtgaattcaacattagaacagtatgtcttttgtactgtaaatgcattgcctgagacgacagcagatatagttgtctttgatgaaatttcaatggccacaaattatgatttgagtgttgtcaatgccagattacgtgctaagcactatgtgtacattggcgaccctgctcaattacctgcaccacgcacattgctaactaagggcacactagaaccagaatatttcaattcagtgtgtagacttatgaaaactataggtccagacatgttcctcggaacttgtcggcgttgtcctgctgaaattgttgacactgtgagtgctttggtttatgataataagcttaaagcacataaagacaaatcagctcaatgctttaaaatgttttataagggtgttatcacgcatgatgtttcatctgcaattaacaggccacaaataggcgtggtaagagaattccttacacgtaaccctgcttggagaaaagctgtctttatttcaccttataattcacagaatgctgtagcctcaaagattttgggactaccaactcaaactgttgattcatcacagggctcagaatatgactatgtcatattcactcaaaccactgaaacagctcactcttgtaatgtaaacagatttaatgttgctattaccagagcaaaagtaggcatactttgcataatgtctgatagagacctttatgacaagttgcaatttacaagtcttgaaattccacgtaggaatgtggcaactttacaagctgaaaatgtaacaggactctttaaagattgtagtaaggtaatcactgggttacatcctacacaggcacctacacacctcagtgttgacactaaattcaaaactgaaggtttatgtgttgacatacctggcatacctaaggacatgacctatagaagactcatctctatgatgggttttaaaatgaattatcaagttaatggttaccctaacatgtttatcacccgcgaagaagctataagacatgtacgtgcatggattggcttcgatgtcgaggggtgtcatgctactagagaagctgttggtaccaatttacctttacagctaggtttttctacaggtgttaacctagttgctgtacctacaggttatgttgatacacctaataatacagatttttccagagttagtgctaaaccaccgcctggagatcaatttaaacacctcataccacttatgtacaaaggacttccttggaatgtagtgcgtataaagattgtacaaatgttaagtgacacacttaaaaatctctctgacagagtcgtatttgtcttatgggcacatggctttgagttgacatctatgaagtattttgtgaaaataggacctgagcgcacctgttgtctatgtgatagacgtgccacatgcttttccactgcttcagacacttatgcctgttggcatcattctattggatttgattacgtctataatccgtttatgattgatgttcaacaatggggttttacaggtaacctacaaagcaaccatgatctgtattgtcaagtccatggtaatgcacatgtagctagttgtgatgcaatcatgactaggtgtctagctgtccacgagtgctttgttaagcgtgttgactggactattgaatatcctataattggtgatgaactgaagattaatgcggcttgtagaaaggttcaacacatggttgttaaagctgcattattagcagacaaattcccagttcttcacgacattggtaaccctaaagctattaagtgtgtacctcaagctgatgtagaatggaagttctatgatgcacagccttgtagtgacaaagcttataaaatagaagaattattctattcttatgccacacattctgacaaattcacagatggtgtatgcctattttggaattgcaatgtcgatagatatcctgctaattccattgtttgtagatttgacactagagtgctatctaaccttaacttgcctggttgtgatggtggcagtttgtatgtaaataaacatgcattccacacaccagcttttgataaaagtgcttttgttaatttaaaacaattaccatttttctattactctgacagtccatgtgagtctcatggaaaacaagtagtgtcagatatagattatgtaccactaaagtctgctacgtgtataacacgttgcaatttaggtggtgctgtctgtagacatcatgctaatgagtacagattgtatctcgatgcttataacatgatgatctcagctggctttagcttgtgggtttacaaacaatttgatacttataacctctggaacacttttacaagacttcagagtttagaaaatgtggcttttaatgttgtaaataagggacactttgatggacaacagggtgaagtaccagtttctatcattaataacactgtttacacaaaagttgatggtgttgatgtagaattgtttgaaaataaaacaacattacctgttaatgtagcatttgagctttgggctaagcgcaacattaaaccagtaccagaggtgaaaatactcaataatttgggtgtggacattgctgctaatactgtgatctgggactacaaaagagatgctccagcacatatatctactattggtgtttgttctatgactgacatagccaagaaaccaactgaaacgatttgtgcaccactcactgtcttttttgatggtagagttgatggtcaagtagacttatttagaaatgcccgtaatggtgttcttattacagaaggtagtgttaaaggtttacaaccatctgtaggtcccaaacaagctagtcttaatggagtcacattaattggagaagccgtaaaaacacagttcaattattataagaaagttgatggtgttgtccaacaattacctgaaacttactttactcagagtagaaatttacaagaatttaaacccaggagtcaaatggaaattgatttcttagaattagctatggatgaattcattgaacggtataaattagaaggctatgccttcgaacatatcgtttatggagattttagtcatagtcagttaggtggtttacatctactgattggactagctaaacgttttaaggaatcaccttttgaattagaagattttattcctatggacagtacagttaaaaactatttcataacagatgcgcaaacaggttcatctaagtgtgtgtgttctgttattgatttattacttgatgattttgttgaaataataaaatcccaagatttatctgtagtttctaaggttgtcaaagtgactattgactatacagaaatttcatttatgctttggtgtaaagatggccatgtagaaacattttacccaaaattacaatctagtcaagcgtggcaaccgggtgttgctatgcctaatctttacaaaatgcaaagaatgctattagaaaagtgtgaccttcaaaattatggtgatagtgcaacattacctaaaggcataatgatgaatgtcgcaaaatatactcaactgtgtcaatatttaaacacattaacattagctgtaccctataatatgagagttatacattttggtgctggttctgataaaggagttgcaccaggtacagctgttttaagacagtggttgcctacgggtacgctgcttgtcgattcagatcttaatgactttgtctctgatgcagattcaactttgattggtgattgtgcaactgtacatacagctaataaatgggatctcattattagtgatatgtacgaccctaagactaaaaatgttacaaaagaaaatgactctaaagagggttttttcacttacatttgtgggtttatacaacaaaagctagctcttggaggttccgtggctataaagataacagaacattcttggaatgctgatctttataagctcatgggacacttcgcatggtggacagcctttgttactaatgtgaatgcgtcatcatctgaagcatttttaattggatgtaattatcttggcaaaccacgcgaacaaatagatggttatgtcatgcatgcaaattacatattttggaggaatacaaatccaattcagttgtcttcctattctttatttgacatgagtaaatttccccttaaattaaggggtactgctgttatgtctttaaaagaaggtcaaatcaatgatatgattttatctcttcttagtaaaggtagacttataattagagaaaacaacagagttgttatttctagtgatgttcttgttaacaactaaacgaacaatgtttgtttttcttgttttattgccactagtctctagtcagtgtgttaatcttacaaccagaactcaattaccccctgcatacactaattctttcacacgtggtgtttattaccctgacaaagttttcagatcctcagttttacattcaactcaggacttgttcttacctttcttttccaatgttacttggttccatgctatacatgtctctgggaccaatggtactaagaggtttgataaccctgtcctaccatttaatgatggtgtttattttgcttccactgagaagtctaacataataagaggctggatttttggtactactttagattcgaagacccagtccctacttattgttaataacgctactaatgttgttattaaagtctgtgaatttcaattttgtaatgatccatttttgggtgtttattaccacaaaaacaacaaaagttggatggaaagtgagttcagagtttattctagtgcgaataattgcacttttgaatatgtctctcagccttttcttatggaccttgaaggaaaacagggtaatttcaaaaatcttagggaatttgtgtttaagaatattgatggttattttaaaatatattctaagcacacgcctattaatttagtgcgtgatctcccccagggtttttcggctttagaaccattggtagatttgccaataggtattaacatcactaggtttcaaactttacttgctttacatagaagttatttgactcctggtgattcttcttcaggttggacagctggtgctgcagcttattatgtgggttatcttcaacctaggacttttctattaaaatataatgaaaatggaaccattacagatgctgtagactgtgcacttgaccctctctcagaaacaaagtgtacgttgaaatccttcactgtagaaaaaggaatctatcaaacttctaactttagagtccaaccaacagaatctattgttagatttcctaatattacaaacttgtgcccttttggtgaagtttttaacgccaccagatttgcatctgtttatgcttggaacaggaagagaatcagcaactgtgttgctgattattctgtcctatataattccgcatcattttccacttttaagtgttatggagtgtctcctactaaattaaatgatctctgctttactaatgtctatgcagattcatttgtaattagaggtgatgaagtcagacaaatcgctccagggcaaactggaaagattgctgattataattataaattaccagatgattttacaggctgcgttatagcttggaattctaacaatcttgattctaaggttggtggtaattataattacctgtatagattgtttaggaagtctaatctcaaaccttttgagagagatatttcaactgaaatctatcaggccggtagcacaccttgtaatggtgttgaaggttttaattgttactttcctttacaatcatatggtttccaacccactaatggtgttggttaccaaccatacagagtagtagtactttcttttgaacttctacatgcaccagcaactgtttgtggacctaaaaagtctactaatttggttaaaaacaaatgtgtcaatttcaacttcaatggtttaacaggcacaggtgttcttactgagtctaacaaaaagtttctgcctttccaacaatttggcagagacattgctgacactactgatgctgtccgtgatccacagacacttgagattcttgacattacaccatgttcttttggtggtgtcagtgttataacaccaggaacaaatacttctaaccaggttgctgttctttatcaggatgttaactgcacagaagtccctgttgctattcatgcagatcaacttactcctacttggcgtgtttattctacaggttctaatgtttttcaaacacgtgcaggctgtttaataggggctgaacatgtcaacaactcatatgagtgtgacatacccattggtgcaggtatatgcgctagttatcagactcagactaattctcctcggcgggcacgtagtgtagctagtcaatccatcattgcctacactatgtcacttggtgcagaaaattcagttgcttactctaataactctattgccatacccacaaattttactattagtgttaccacagaaattctaccagtgtctatgaccaagacatcagtagattgtacaatgtacatttgtggtgattcaactgaatgcagcaatcttttgttgcaatatggcagtttttgtacacaattaaaccgtgctttaactggaatagctgttgaacaagacaaaaacacccaagaagtttttgcacaagtcaaacaaatttacaaaacaccaccaattaaagattttggtggttttaatttttcacaaatattaccagatccatcaaaaccaagcaagaggtcatttattgaagatctacttttcaacaaagtgacacttgcagatgctggcttcatcaaacaatatggtgattgccttggtgatattgctgctagagacctcatttgtgcacaaaagtttaacggccttactgttttgccacctttgctcacagatgaaatgattgctcaatacacttctgcactgttagcgggtacaatcacttctggttggacctttggtgcaggtgctgcattacaaataccatttgctatgcaaatggcttataggtttaatggtattggagttacacagaatgttctctatgagaaccaaaaattgattgccaaccaatttaatagtgctattggcaaaattcaagactcactttcttccacagcaagtgcacttggaaaacttcaagatgtggtcaaccaaaatgcacaagctttaaacacgcttgttaaacaacttagctccaattttggtgcaatttcaagtgttttaaatgatatcctttcacgtcttgacaaagttgaggctgaagtgcaaattgataggttgatcacaggcagacttcaaagtttgcagacatatgtgactcaacaattaattagagctgcagaaatcagagcttctgctaatcttgctgctactaaaatgtcagagtgtgtacttggacaatcaaaaagagttgatttttgtggaaagggctatcatcttatgtccttccctcagtcagcacctcatggtgtagtcttcttgcatgtgacttatgtccctgcacaagaaaagaacttcacaactgctcctgccatttgtcatgatggaaaagcacactttcctcgtgaaggtgtctttgtttcaaatggcacacactggtttgtaacacaaaggaatttttatgaaccacaaatcattactacagacaacacatttgtgtctggtaactgtgatgttgtaataggaattgtcaacaacacagtttatgatcctttgcaacctgaattagactcattcaaggaggagttagataaatattttaagaatcatacatcaccagatgttgatttaggtgacatctctggcattaatgcttcagttgtaaacattcaaaaagaaattgaccgcctcaatgaggttgccaagaatttaaatgaatctctcatcgatctccaagaacttggaaagtatgagcagtatataaaatggccatggtacatttggctaggttttatagctggcttgattgccatagtaatggtgacaattatgctttgctgtatgaccagttgctgtagttgtctcaagggctgttgttcttgtggatcctgctgcaaatttgatgaagacgactctgagccagtgctcaaaggagtcaaattacattacacataaacgaacttatggatttgtttatgagaatcttcacaattggaactgtaactttgaagcaaggtgaaatcaaggatgctactccttcagattttgttcgcgctactgcaacgataccgatacaagcctcactccctttcggatggcttattgttggcgttgcacttcttgctgtttttcagagcgcttccaaaatcataaccctcaaaaagagatggcaactagcactctccaagggtgttcactttgtttgcaacttgctgttgttgtttgtaacagtttactcacaccttttgctcgttgctgctggccttgaagccccttttctctatctttatgctttagtctacttcttgcagagtataaactttgtaagaataataatgaggctttggctttgctggaaatgccgttccaaaaacccattactttatgatgccaactattttctttgctggcatactaattgttacgactattgtataccttacaatagtgtaacttcttcaattgtcattacttcaggtgatggcacaacaagtcctatttctgaacatgactaccagattggtggttatactgaaaaatgggaatctggagtaaaagactgtgttgtattacacagttacttcacttcagactattaccagctgtactcaactcaattgagtacagacactggtgttgaacatgttaccttcttcatctacaataaaattgttgatgagcctgaagaacatgtccaaattcacacaatcgacggttcatccggagttgttaatccagtaatggaaccaatttatgatgaaccgacgacgactactagcgtgcctttgtaagcacaagctgatgagtacgaacttatgtactcattcgtttcggaagagacaggtacgttaatagttaatagcgtacttctttttcttgctttcgtggtattcttgctagttacactagccatccttactgcgcttcgattgtgtgcgtactgctgcaatattgttaacgtgagtcttgtaaaaccttctttttacgtttactctcgtgttaaaaatctgaattcttctagagttcctgatcttctggtctaaacgaactaaatattatattagtttttctgtttggaactttaattttagccatggcagattccaacggtactattaccgttgaagagcttaaaaagctccttgaacaatggaacctagtaataggtttcctattccttacatggatttgtcttctacaatttgcctatgccaacaggaataggtttttgtatataattaagttaattttcctctggctgttatggccagtaactttagcttgttttgtgcttgctgctgtttacagaataaattggatcaccggtggaattgctatcgcaatggcttgtcttgtaggcttgatgtggctcagctacttcattgcttctttcagactgtttgcgcgtacgcgatccatgtggtcattcaatccagaaactaacattcttctcaacgtgccactccatggcactattctgaccagaccgcttctagaaagtgaactcgtaatcggagctgtgatccttcgtggacatcttcgtattgctggacaccatctaggacgctgtgacatcaaggacctgcctaaagaaatcactgttgctacatcacgaacgctttcttattacaaattgggagcttcgcagcgtgtagcaggtgactcaggttttgctgcatacagtcgctacaggattggcaactataaattaaacacagaccattccagtagcagtgacaatattgctttgcttgtacagtaagtgacaacagatgtttcatctcgttgactttcaggttactatagcagagatattactaattattatgaggacttttaaagtttccatttggaatcttgattacatcataaacctcataattaaaaatttatctaagtcactaactgagaataaatattctcaattagatgaagagcaaccaatggagattgattaaacgaacatgaaaattattcttttcttggcactgataacactcgctacttgtgagctttatcactaccaagagtgtgttagaggtacaacagtacttttaaaagaaccttgctcttctggaacatacgagggcaattcaccatttcatcctctagctgataacaaatttgcactgacttgctttagcactcaatttgcttttgcttgtcctgacggcgtaaaacacgtctatcagttacgtgccagatcagtttcacctaaactgttcatcagacaagaggaagttcaagaactttactctccaatttttcttattgttgcggcaatagtgtttataacactttgcttcacactcaaaagaaagacagaatgattgaactttcattaattgacttctatttgtgctttttagcctttctgctattccttgttttaattatgcttattatcttttggttctcacttgaactgcaagatcataatgaaacttgtcacgcctaaacgaacatgaaatttcttgttttcttaggaatcatcacaactgtagctgcatttcaccaagaatgtagtttacagtcatgtactcaacatcaaccatatgtagttgatgacccgtgtcctattcacttctattctaaatggtatattagagtaggagctagaaaatcagcacctttaattgaattgtgcgtggatgaggctggttctaaatcacccattcagtacatcgatatcggtaattatacagtttcctgtttaccttttacaattaattgccaggaacctaaattgggtagtcttgtagtgcgttgttcgttctatgaagactttttagagtatcatgacgttcgtgttgttttagatttcatctaaacgaacaaactaaaatgtctgataatggaccccaaaatcagcgaaatgcaccccgcattacgtttggtggaccctcagattcaactggcagtaaccagaatggagaacgcagtggggcgcgatcaaaacaacgtcggccccaaggtttacccaataatactgcgtcttggttcaccgctctcactcaacatggcaaggaagaccttaaattccctcgaggacaaggcgttccaattaacaccaatagcagtccagatgaccaaattggctactaccgaagagctaccagacgaattcgtggtggtgacggtaaaatgaaagatctcagtccaagatggtatttctactacctaggaactgggccagaagctggacttccctatggtgctaacaaagacggcatcatatgggttgcaactgagggagccttgaatacaccaaaagatcacattggcacccgcaatcctgctaacaatgctgcaatcgtgctacaacttcctcaaggaacaacattgccaaaaggcttctacgcagaagggagcagaggcggcagtcaagcctcttctcgttcctcatcacgtagtcgcaacagttcaagaaattcaactccaggcagcagtaggggaacttctcctgctagaatggctggcaatggcggtgatgctgctcttgctttgctgctgcttgacagattgaaccagcttgagagcaaaatgtctggtaaaggccaacaacaacaaggccaaactgtcactaagaaatctgctgctgaggcttctaagaagcctcggcaaaaacgtactgccactaaagcatacaatgtaacacaagctttcggcagacgtggtccagaacaaacccaaggaaattttggggaccaggaactaatcagacaaggaactgattacaaacattggccgcaaattgcacaatttgcccccagcgcttcagcgttcttcggaatgtcgcgcattggcatggaagtcacaccttcgggaacgtggttgacctacacaggtgccatcaaattggatgacaaagatccaaatttcaaagatcaagtcattttgctgaataagcatattgacgcatacaaaacattcccaccaacagagcctaaaaaggacaaaaagaagaaggctgatgaaactcaagccttaccgcagagacagaagaaacagcaaactgtgactcttcttcctgctgcagatttggatgatttctccaaacaattgcaacaatccatgagcagtgctgactcaactcaggcctaaactcatgcagaccacacaaggcagatgggctatataaacgttttcgcttttccgtttacgatatatagtctactcttgtgcagaatgaattctcgtaactacatagcacaagtagatgtagttaactttaatctcacatagcaatctttaatcagtgtgtaacattagggaggacttgaaagagccaccacattttcaccgaggccacgcggagtacgatcgagtgtacagtgaacaatgctagggagagctgcctatatggaagagccctaatgtgtaaaattaattttagtagtgctatccccatgtgattttaatagcttcttaggagaatgacaaaaaaaaaaaaaaaaaaaaaaaaaaaaaaaaaaaaaaaaaaaaaaaaaaaaaaaaaaagggtcggcatggcatctccacctcctcgcggtccgacctgggcatccgaaggaggacgcacgtccactcggatggctaagggagcagcacactggcggccgttactagggccgcgcccttcccaacagttgcgcagcctgaatggcgaatggagatccaatttttaagtgtataatgtgttaaactactgattctaattgtttgtgtattttagattcacagtcccaaggctcatttcaggcccctcagtcctcacagtctgttcatgatcataatcagccataccacatttgtagaggttttacttgctttaaaaaacctcccacacctccccctgaacctgaaacataaaatgaatgcaattgttgttgttaacttgtttattgcagcttataatggttacaaataaagcaatagcatcacaaatttcacaaataaagcatttttttcactgcattctagttgtggtttgtccaaactcatcaatgtatcttaaagcttgagtattctatagtctcacctaaatagcttggcgtaatcatggtcatagctgtttcctgtgtgaaattgttatccgctcacaattccacacaacatacgagccggaagcataaagtgtaaagcctggggtgcctaatgagtgagctaactcacattaattgcgttgcgctcactgcccgctttccagtcgggaaacctgtcgtgccagctgcattaatgaatcggccaacgcgaaccccttgcggccgcccgggccgtcgaccaattctcatgtttgacagcttatcatcgaatttctgccattcatccgcttattatcacttattcaggcgtagcaaccaggcgtttaagggcaccaataactgccttaaaaaaattacgccccgccctgccactcatcgcagtactgttgtaattcattaagcattctgccgacatggaagccatcacaaacggcatgatgaacctgaatcgccagcggcatcagcaccttgtcgccttgcgtataatatttgcccatggtgaaaacgggggcgaagaagttgtccatattggccacgtttaaatcaaaactggtgaaactcacccagggattggctgagacgaaaaacatattctcaataaaccctttagggaaataggccaggttttcaccgtaacacgccacatcttgcgaatatatgtgtagaaactgccggaaatcgtcgtggtattcactccagagcgatgaaaacgtttcagtttgctcatggaaaacggtgtaacaagggtgaacactatcccatatcaccagctcaccgtctttcattgccatacgaaattccggatgagcattcatcaggcgggcaagaatgtgaataaaggccggataaaacttgtgcttatttttctttacggtctttaaaaaggccgtaatatccagctgaacggtctggttataggtacattgagcaactgactgaaatgcctcaaaatgttctttacgatgccattgggatatatcaacggtggtatatccagtgatttttttctccattttagcttccttagctcctgaaaatctcgataactcaaaaaatacgcccggtagtgatcttatttcattatggtgaaagttggaacctcttacgtgccgatcaacgtctcattttcgccaaaagttggcccagggcttcccggtatcaacagggacaccaggatttatttattctgcgaagtgatcttccgtcacaggtatttattcgcgataagctcatggagcggcgtaaccgtcgcacaggaaggacagagaaagcgcggatctgggaagtgacggacagaacggtcaggacctggattggggaggcggttgccgccgctgctgctgacggtgtgacgttctctgttccggtcacaccacatacgttccgccattcctatgcgatgcacatgctgtatgccggtataccgctgaaagttctgcaaagcctgatgggacataagtccatcagttcaacggaagtctacacgaaggtttttgcgctggatgtggctgcccggcaccgggtgcagtttgcgatgccggagtctgatgcggttgcgatgctgaaacaattatcctgagaataaatgccttggcctttatatggaaatgtggaactgagtggatatgctgtttttgtctgttaaacagagaagctggctgttatccactgagaagcgaacgaaacagtcgggaaaatctcccattatcgtagagatccgcattattaatctcaggagcctgtgtagcgtttataggaagtagtgttctgtcatgatgcctgcaagcggtaacgaaaacgatttgaatatgccttcaggaacaatagaaatcttcgtgcggtgttacgttgaagtggagcggattatgtcagcaatggacagaacaacctaatgaacacagaaccatgatgtggtctgtccttttacagccagtagtgctcgccgcagtcgagcgacagggcgaagccctcggctggttgccctcgccgctgggctggcggccgtctatggccctgcaaacgcgccagaaacgccgtcgaagccgtgtgcgagacaccgcggccggccgccggcgttgtggatacctcgcggaaaacttggccctcactgacagatgaggggcggacgttgacacttgaggggccgactcacccggcgcggcgttgacagatgaggggcaggctcgatttcggccggcgacgtggagctggccagcctcgcaaatcggcgaaaacgcctgattttacgcgagtttcccacagatgatgtggacaagcctggggataagtgccctgcggtattgacacttgaggggcgcgactactgacagatgaggggcgcgatccttgacacttgaggggcagagtgctgacagatgaggggcgcacctattgacatttgaggggctgtccacaggcagaaaatccagcatttgcaagggtttccgcccgtttttcggccaccgctaacctgtcttttaacctgcttttaaaccaatatttataaaccttgtttttaaccagggctgcgccctgtgcgcgtgaccgcgcacgccgaaggggggtgcccccccttctcgaaccctcccggtcgagtgagcgaggaagcaccagggaacagcacttatatattctgcttacacacgatgcctgaaaaaacttcccttggggttatccacttatccacggggatatttttataattattttttttatagtttttagatcttcttttttagagcgccttgtaggcctttatccatgctggttctagagaaggtgttgtgacaaattgccctttcagtgtgacaaatcaccctcaaatgacagtcctgtctgtgacaaattgcccttaaccctgtgacaaattgccctcagaagaagctgttttttcacaaagttatccctgcttattgactcttttttatttagtgtgacaatctaaaaacttgtcacacttcacatggatctgtcatggcggaaacagcggttatcaatcacaagaaacgtaaaaatagcccgcgaatcgtccagtcaaacgacctcactgaggcggcatatagtctctcccgggatcaaaaacgtatgctgtatctgttcgttgaccagatcagaaaatctgatggcaccctacaggaacatgacggtatctgcgagatccatgttgctaaatatgctgaaatattcggattgacctctgcggaagccagtaaggatatacggcaggcattgaagagtttcgcggggaaggaagtggttttttatcgccctgaagaggatgccggcgatgaaaaaggctatgaatcttttccttggtttatcaaacgtgcgcacagtccatccagagggctttacagtgtacatatcaacccatatctcattcccttctttatcgggttacagaaccggtttacgcagtttcggcttagtgaaacaaaagaaatcaccaatccgtatgccatgcgtttatacgaatccctgtgtcagtatcgtaagccggatggctcaggcatcgtctctctgaaaatcgactggatcatagagcgttaccagctgcctcaaagttaccagcgtatgcctgacttccgccgccgcttcctgcaggtctgtgttaatgagatcaacagcagaactccaatgcgcctctcatacattgagaaaaagaaaggccgccagacgactcatatcgtattttccttccgcgatatcacttccatgacgacaggatagtctgagggttatctgtcacagatttgagggtggttcgtcacatttgttctgacctactgagggtaatttgtcacagttttgctgtttccttcagcctgcatggattttctcatactttttgaactgtaatttttaaggaagccaaatttgagggcagtttgtcacagttgatttccttctctttcccttcgtcatgtgacctgatatcgggggttagttcgtcatcattgatgagggttgattatcacagtttattactctgaattggctatccgcgtgtgtacctctacctggagtttttcccacggtggatatttcttcttgcgctgagcgtaagagctatctgacagaacagttcttctttgcttcctcgccagttcgctcgctatgctcggttacacggctgcggcg

SEQ ID NO: 26 - DNA, 35283 bp, Artificial Sequence
  Clone pCCI-4K-SARS-CoV-2-WWDWD. Based on SARS-CoV-2.
gatgtgctgcaaggcgattaagttgggtaacgccagggttttcccagtcacgacgttgtaaaacgacggccagtgaattgtaatacgactcactatagggcgaattctagttattaatagtaatcaattacggggtcattagttcatagcccatatatggagttccgcgttacataacttacggtaaatggcccgcctggctgaccgcccaacgacccccgcccattgacgtcaataatgacgtatgttcccatagtaacgccaatagggactttccattgacgtcaatgggtggagtatttacggtaaactgcccacttggcagtacatcaagtgtatcatatgccaagtacgccccctattgacgtcaatgacggtaaatggcccgcctggcattatgcccagtacatgaccttatgggactttcctacttggcagtacatctacgtattagtcatcgctattaccatggtgatgcggttttggcagtacatcaatgggcgtggatagcggtttgactcacggggatttccaagtctccaccccattgacgtcaatgggagtttgttttggcaccaaaatcaacgggactttccaaaatgtcgtaacaactccgccccattgacgcaaatgggcggtaggcgtgtacggtgggaggtctatataagcagagctggtttagtgaaccgtattaaaggtttataccttcccaggtaacaaaccaaccaactttcgatctcttgtagatctgttctctaaacgaactttaaaatctgtgtggctgtcactcggctgcatgcttagtgcactcacgcagtataattaataactaattactgtcgttgacaggacacgagtaactcgtctatcttctgcaggctgcttacggtttcgtccgtgttgcagccgatcatcagcacatctaggtttcgtccgggtgtgaccgaaaggtaagatggagagccttgtccctggtttcaacgagaaaacacacgtccaactcagtttgcctgttttacaggttcgcgacgtgctcgtacgtggctttggagactccgtggaggaggtcttatcagaggcacgtcaacatcttaaagatggcacttgtggcttagtagaagttgaaaaaggcgttttgcctcaacttgaacagccctatgtgttcatcaaacgttcggatgctcgaactgcacctcatggtcatgttatggttgagctggtagcagaactcgaaggcattcagtacggtcgtagtggtgagacacttggtgtccttgtccctcatgtgggcgaaataccagtggcttaccgcaaggttcttcttcgtaagaacggtaataaaggagctggtggccatagttacggcgccgatctaaagtcatttgacttaggcgacgagcttggcactgatccttatgaagattttcaagaaaactggaacactaaacatagcagtggtgttacccgtgaactcatgcgtgagcttaacggaggggcatacactcgctatgtcgataacaacttctgtggccctgatggctaccctcttgagtgcattaaagaccttctagcacgtgctggtaaagcttcatgcactttgtccgaacaactggactttattgacactaagaggggtgtatactgctgccgtgaacatgagcatgaaattgcttggtacacggaacgttctgaaaagagctatgaattgcagacaccttttgaaattaaattggcaaagaaatttgacaccttcaatggggaatgtccaaattttgtatttcccttaaattccataatcaagactattcaaccaagggttgaaaagaaaaagcttgatggctttatgggtagaattcgatctgtctatccagttgcgtcaccaaatgaatgcaaccaaatgtgcctttcaactctcatgaagtgtgatcattgtggtgaaacttcatggcagacgggcgattttgttaaagccacttgcgaattttgtggcactgagaatttgactaaagaaggtgccactacttgtggttacttaccccaaaatgctgttgttaaaatttattgtccagcatgtcacaattcagaagtaggacctgagcatagtcttgccgaataccataatgaatctggcttgaaaaccattcttcgtaagggtggtcgcactattgcctttggaggctgtgtgttctcttatgttggttgccataacaagtgtgcctattgggtcccacgtgctagcgctaacataggttgtaaccatacaggtgttgttggagaaggttccgaaggtcttaatgacaaccttcttgaaatactccaaaaagagaaagtcaacatcaatattgttggtgactttaaacttaatgaagagatcgccattattttggcatctttttctgcttccacaagtgcttttgtggaaactgtgaaaggtttggattataaagcattcaaacaaattgttgaatcctgtggtaattttaaagttacaaaaggaaaagctaaaaaaggtgcctggaatattggtgaacagaaatcaatactgagtcctctttatgcatttgcatcagaggctgctcgtgttgtacgatcaattttctcccgcactcttgaaactgctcaaaattctgtgcgtgttttacagaaggccgctataacaatactagatggaatttcacagtattcactgagactcattgatgctatgatgttcacatctgatttggctactaacaatctagttgtaatggcctacattacaggtggtgttgttcagttgacttcgcagtggctaactaacatctttggcactgtttatgaaaaactcaaacccgtccttgattggcttgaagagaagtttaaggaaggtgtagagtttcttagagacggttgggaaattgttaaatttatctcaacctgtgcttgtgaaattgtcggtggacaaattgtcacctgtgcaaaggaaattaaggagagtgttcagacattctttaagcttgtaaataaatttttggctttgtgtgctgactctatcattattggtggagctaaacttaaagccttgaatttaggtgaaacatttgtcacgcactcaaagggattgtacagaaagtgtgttaaatccagagaagaaactggcctactcatgcctctaaaagccccaaaagaaattatcttcttagagggagaaacacttcccacagaagtgttaacagaggaagttgtcttgaaaactggtgatttacaaccattagaacaacctactagtgaagctgttgaagctccattggttggtacaccagtttgtattaacgggcttatgttgctcgaaatcaaagacacagaaaagtactgtgcccttgcacctaatatgatggtaacaaacaataccttcacactcaaaggcggtgcaccaacaaaggttacttttggtgatgacactgtgatagaagtgcaaggttacaagagtgtgaatatcacttttgaacttgatgaaaggattgataaagtacttaatgagaagtgctctgcctatacagttgaactcggtacagaagtaaatgagttcgcctgtgttgtggcagatgctgtcataaaaactttgcaaccagtatctgaattacttacaccactgggcattgatttagatgagtggagtatggctacatactacttatttgatgagtctggtgagtttaaattggcttcacatatgtattgttctttctaccctccagatgaggatgaagaagaaggtgattgtgaagaagaagagtttgagccatcaactcaatatgagtatggtactgaagatgattaccaaggtaaacctttggaatttggtgccacttctgctgctcttcaacctgaagaagagcaagaagaagattggttagatgatgatagtcaacaaactgttggtcaacaagacggcagtgaggacaatcagacaactactattcaaacaattgttgaggttcaacctcaattagagatggaacttacaccagttgttcagactattgaagtgaatagttttagtggttatttaaaacttactgacaatgtatacattaaaaatgcagacattgtggaagaagctaaaaaggtaaaaccaacagtggttgttaatgcagccaatgtttaccttaaacatggaggaggtgttgcaggagccttaaataaggctactaacaatgccatgcaagttgaatctgatgattacatagctactaatggaccacttaaagtgggtggtagttgtgttttaagcggacacaatcttgctaaacactgtcttcatgttgtcggcccaaatgttaacaaaggtgaagacattcaacttcttaagagtgcttatgaaaattttaatcagcacgaagttctacttgcaccattattatcagctggtatttttggtgctgaccctatacattctttaagagtttgtgtagatactgttcgcacaaatgtctacttagctgtctttgataaaaatctctatgacaaacttgtttcaagctttttggaaatgaagagtgaaaagcaagttgaacaaaagatcgctgagattcctaaagaggaagttaagccatttataactgaaagtaaaccttcagttgaacagagaaaacaagatgataagaaaatcaaagcttgtgttgaagaagttacaacaactctggaagaaactaagttcctcacagaaaacttgttactttatattgacattaatggcaatcttcatccagattctgccactcttgttagtgacattgacatcactttcttaaagaaagatgctccatatatagtgggtgatgttgttcaagagggtgttttaactgctgtggttatacctactaaaaaggctggtggcactactgaaatgctagcgaaagctttgagaaaagtgccaacagacaattatataaccacttacccgggtcagggtttaaatggttacactgtagaggaggcaaagacagtgcttaaaaagtgtaaaagtgccttttacattctaccatctattatctctaatgagaagcaagaaattcttggaactgtttcttggaatttgcgagaaatgcttgcacatgcagaagaaacacgcaaattaatgcctgtctgtgtggaaactaaagccatagtttcaactatacagcgtaaatataagggtattaaaatacaagagggtgtggttgattatggtgctagattttacttttacaccagtaaaacaactgtagcgtcacttatcaacacacttaacgatctaaatgaaactcttgttacaatgccacttggctatgtaacacatggcttaaatttggaagaagctgctcggtatatgagatctctcaaagtgccagctacagtttctgtttcttcacctgatgctgttacagcgtataatggttatcttacttcttcttctaaaacacctgaagaacattttattgaaaccatctcacttgctggttcctataaagattggtcctattctggacaatctacacaactaggtatagaatttcttaagagaggtgataaaagtgtatattacactagtaatcctaccacattccacctagatggtgaagttatcacctttgacaatcttaagacacttctttctttgagagaagtgaggactattaaggtgtttacaacagtagacaacattaacctccacacgcaagttgtggacatgtcaatgacatatggacaacagtttggtccaacttatttggatggagctgatgttactaaaataaaacctcataattcacatgaaggtaaaacattttatgttttacctaatgatgacactctacgtgttgaggcttttgagtactaccacacaactgatcctagttttctgggtaggtacatgtcagcattaaatcacactaaaaagtggaaatacccacaagttaatggtttaacttctattaaatgggcagataacaactgttatcttgccactgcattgttaacactccaacaaatagagttgaagtttaatccacctgctctacaagatgcttattacagagcaagggctggtgaagctgctaacttttgtgcacttatcttagcctactgtaataagacagtaggtgagttaggtgatgttagagaaacaatgagttacttgtttcaacatgccaatttagattcttgcaaaagagtcttgaacgtggtgtgtaaaacttgtggacaacagcagacaacccttaagggtgtagaagctgttatgtacatgggcacactttcttatgaacaatttaagaaaggtgttcagataccttgtacgtgtggtaaacaagctacaaaatatctagtacaacaggagtcaccttttgttatgatgtcagcaccacctgctcagtatgaacttaagcatggtacatttacttgtgctagtgagtacactggtaattaccagtgtggtcactataaacatataacttctaaagaaactttgtattgcatagacggtgctttacttacaaagtcctcagaatacaaaggtcctattacggatgttttctacaaagaaaacagttacacaacaaccataaaaccagttacttataaattggatggtgttgtttgtacagaaattgaccctaagttggacaattattataagaaagacaattcttatttcacagagcaaccaattgatcttgtaccaaaccaaccatatccaaacgcaagcttcgataattttaagtttgtatgtgataatatcaaatttgctgatgatttaaaccagttaactggttataagaaacctgcttcaagagagcttaaagttacatttttccctgacttaaatggtgatgtggtggctattgattataaacactacacaccctcttttaagaaaggagctaaattgttacataaacctattgtttggcatgttaacaatgcaactaataaagccacgtataaaccaaatacctggtgtatacgttgtctttggagcacaaaaccagttgaaacatcaaattcgtttgatgtactgaagtcagaggacgcgcagggaatggataatcttgcctgcgaagatctaaaaccagtctctgaagaagtagtggaaaatcctaccatacagaaagacgttcttgagtgtaatgtgaaaactaccgaagttgtaggagacattatacttaaaccagcaaataatagtttaaaaattacagaagaggttggccacacagatctaatggctgcttatgtagacaattctagtcttactattaagaaacctaatgaattatctagagtattaggtttgaaaacccttgctactcatggtttagctgctgttaatagtgtcccttgggatactatagctaattatgctaagccttttcttaacaaagttgttagtacaactactaacatagttacacggtgtttaaaccgtgtttgtactaattatatgccttatttctttactttattgctacaattgtgtacttttactagaagtacaaattctagaattaaagcatctatgccgactactatagcaaagaatactgttaagagtgtcggtaaattttgtctagaggcttcatttaattatttgaagtcacctaatttttctaaactgataaatattataatttggtttttactattaagtgtttgcctaggttcgttaatatattcgacggcggcgttaggtgtattaatgtcgaatttaggtatgccgtcgtattgtacgggttatcgtgaaggttatttaaattcgacgaatgtaacgatagcgacgtattgtacgggttcgataccgtgttcggtatgtctatcgggtttagattcgttagatacgtatccgtcgttagaaacgatacaaataacgatatcgtcgtttaaatgggatttaacggcgtttggtttagtagcggaatggtttttagcgtatatactatttacgcgatttttttatgtactaggtttagcggcgataatgcaattatttttttcgtattttgcggtacattttatttcgaattcgtggctaatgtggttaataataaatctagtacaaatggcgccgatatcggcgatggtacgtatgtatatattttttgcgtcgttttattatgtatggaaatcgtatgtacatgtagtagatggttgtaattcgtcgacgtgtatgatgtgttataaacgtaatcgtgcgacgcgagtagaatgtacgacgatagtaaatggtgtacgtcgttcgttttatgtatatgcgaatggtggtaaaggtttttgtaaactacataattggaattgtgtaaattgtgatacgttttgtgcgggttcgacgtttatatcggatgaagtagcgcgtgatttatcgctacaatttaaacgtccgataaatccgacggatcaatcgtcgtatatagtagattcggtaacggtaaaaaatggttcgatacatctatattttgataaagcgggtcaaaaaacgtatgaacgtcattcgctatcgcattttgtaaatttagataatctacgtgcgaataatacgaaaggttcgttaccgataaatgtaatagtatttgatggtaaatcgaaatgtgaagaatcgtcggcgaaatcggcgtcggtatattattcgcaactaatgtgtcaaccgatactattactagatcaagcgttagtatcggatgtaggtgattcggcggaagtagcggtaaaaatgtttgatgcgtatgtaaatacgttttcgtcgacgtttaatgtaccgatggaaaaactaaaaacgctagtagcgacggcggaagcggaactagcgaaaaatgtatctttagataatgtattatcgacgtttatatcggcggcgcgtcaaggttttgtagattcggatgtagaaacgaaagatgtagtagaatgtctaaaattatcgcatcaatcggatatagaagtaacgggtgattcgtgtaataattatatgctaacgtataataaagtagaaaatatgacgccgcgtgatctaggtgcgtgtatagattgttcggcgcgtcatataaatgcgcaagtagcgaaatcgcataatatagcgttaatatggaatgtaaaagattttatgtcgttatcggaacaactacgtaaacaaatacgttcggcggcgaaaaaaaataatttaccgtttaaattaacgtgtgcgacgacgcgacaagtagtaaatgtagtaacgacgaaaatagcgctaaaaggtggtaaaatagtaaataattggttaaaacaattaattaaagttacacttgtgttcctttttgttgctgctattttctatttaataacacctgttcatgtcatgtctaaacatactgacttttcaagtgaaatcataggatacaaggctattgatggtggtgtcactcgtgacatagcatctacagatacttgttttgctaacaaacatgctgattttgacacatggtttagccagcgtggtggtagttatactaatgacaaagcttgcccattgattgctgcagtcataacaagagaagtgggttttgtcgtgcctggtttgcctggcacgatattacgcacaactaatggtgactttttgcatttcttacctagagtttttagtgcagttggtaacatctgttacacaccatcaaaacttatagagtacactgactttgcaacatcagcttgtgttttggctgctgaatgtacaatttttaaagatgcttctggtaagccagtaccatattgttatgataccaatgtactagaaggttctgttgcttatgaaagtttacgccctgacacacgttatgtgctcatggatggctctattattcaatttcctaacacctaccttgaaggttctgttagagtggtaacaacttttgattctgagtactgtaggcacggcacttgtgaaagatcagaagctggtgtttgtgtatctactagtggtagatgggtacttaacaatgattattacagatctttaccaggagttttctgtggtgtagatgctgtaaatttacttactaatatgtttacaccactaattcaacctattggtgctttggacatatcagcatctatagtagctggtggtattgtagctatcgtagtaacatgccttgcctactattttatgaggtttagaagagcttttggtgaatacagtcatgtagttgcctttaatactttactattccttatgtcattcactgtactctgtttaacaccagtttactcattcttacctggtgtttattctgttatttacttgtacttgacattttatcttactaatgatgtttcttttttagcacatattcagtggatggttatgttcacacctttagtacctttctggataacaattgcttatatcatttgtatttccacaaagcatttctattggttctttagtaattacctaaagagacgtgtagtctttaatggtgtttcctttagtacttttgaagaagctgcgctgtgcacctttttgttaaataaagaaatgtatctaaagttgcgtagtgatgtgctattacctcttacgcaatataatagatacttagctctttataataagtacaagtattttagtggagcaatggatacaactagctacagagaagctgcttgttgtcatctcgcaaaggctctcaatgacttcagtaactcaggttctgatgttctttaccaaccaccacaaacctctatcacctcagctgttttgcagagtggttttagaaaaatggcattcccatctggtaaagttgagggttgtatggtacaagtaacttgtggtacaactacacttaacggtctttggcttgatgacgtagtttactgtccaagacatgtgatctgcacctctgaagacatgcttaaccctaattatgaagatttactcattcgtaagtctaatcataatttcttggtacaggctggtaatgttcaactcagggttattggacattctatgcaaaattgtgtacttaagcttaaggttgatacagccaatcctaagacacctaagtataagtttgttcgcattcaaccaggacagactttttcagtgttagcttgttacaatggttcaccatctggtgtttaccaatgtgctatgaggcccaatttcactattaagggttcattccttaatggttcatgtggtagtgttggttttaacatagattatgactgtgtctctttttgttacatgcaccatatggaattaccaactggagttcatgctggcacagacttagaaggtaacttttatggaccttttgttgacaggcaaacagcacaagcagctggtacggacacaactattacagttaatgttttagcttggttgtacgctgctgttataaatggagacaggtggtttctcaatcgatttaccacaactcttaatgactttaaccttgtggctatgaagtacaattatgaacctctaacacaagaccatgttgacatactaggacctctttctgctcaaactggaattgccgttttagatatgtgtgcttcattaaaagaattactgcaaaatggtatgaatggacgtaccatattgggtagtgctttattagaagatgaatttacaccttttgatgttgttagacaatgctcaggtgttactttccaaagtgcagtgaaaagaacaatcaagggtacacaccactggttgttactcacaattttgacttcacttttagttttagtccagagtactcaatggtctttgttcttttttttgtatgaaaatgcctttttaccttttgctatgggtattattgctatgtctgcttttgcaatgatgtttgtcaaacataagcatgcgtttctatgtttatttttattaccgtcgctagcgacggtagcgtattttaatatggtatatatgccggcgtcgtgggtaatgcgtataatgacgtggttagatatggtagatacgtcgttatcgggttttaaactaaaagattgtgtaatgtatgcgtcggcggtagtattactaatactaatgacggcgcgtacggtatatgatgatggtgcgcgtcgtgtatggacgctaatgaatgtattaacgctagtatataaagtatattatgggaatgcgttagatcaagcgatatcgatgtgggcgctaataatatcggtaacgtcgaattattcgggtgtagtaacgacggtaatgtttttagcgcgtggtatagtatttatgtgtgtagaatattgtccgatattttttataacgggtaatacactacaatgtataatgctagtatattgttttttaggttatttttgtacgtgttattttggtctattttgtttactaaatcgttattttcgtctaacactaggtgtatatgattatttagtatcgacgcaagaatttcgttatatgaattcgcaaggtctactaccgccgaaaaattcgatagatgcgtttaaactaaatataaaattattaggtgtaggtggtaaaccgtgtataaaagtagcgacggtacaatcgaaaatgtcggatgtaaaatgtacatcggtagtattactatcggtattacaacaactacgtgtagaatcgtcgtcgaaattatgggcgcaatgtgtacaattacataatgatatactattagcgaaagatacgacggaagcgtttgaaaaaatggtatcgctactatcggtattactatcgatgcaaggtgcggtagatataaataaactatgtgaagaaatgctagataatcgtgcgacgttacaagcgatagcgtcggaattttcgtcgctaccgtcgtatgcggcgtttgcgacggcgcaagaagcgtatgaacaagcggtagcgaatggtgattcggaagtagtactaaaaaaattaaaaaaatcgttaaatgtagcgaaatcggaatttgatcgtgatgcggcgatgcaacgtaaattagaaaaaatggcggatcaagcgatgacgcaaatgtataaacaagcgcgttcggaagataaacgtgcgaaagtaacgtcggcgatgcaaacgatgctatttacgatgctacgtaaattagataatgatgcgctaaataatataataaataatgcgcgtgatggttgtgtaccgttaaatataataccgctaacgacggcggcgaaactaatggtagtaataccggattataatacatataaaaatacgtgtgatggtacgacgtttacgtatgcgtcggcgttatgggaaatacaacaagtagtagatgcggattcgaaaatagtacaactatcggaaatatcgatggataattcgccgaatttagcgtggccgctaatagtaacggcgttacgtgcgaattcggcggtaaaattacaaaataatgaactatcgccggtagcgctacgacagatgtcttgtgctgccggtactacacaaactgcttgcactgatgacaatgcgttagcttactacaacacaacaaagggaggtaggtttgtacttgcactgttatccgatttacaggatttgaaatgggctagattccctaagagtgatggaactggtactatctatacagaactggaaccaccttgtaggtttgttacagacacacctaaaggtcctaaagtgaagtatttatactttattaaaggattaaacaacctaaatagaggtatggtacttggtagtttagctgccacagtacgtctacaagctggtaatgcaacagaagtgcctgccaattcaactgtattatctttctgtgcttttgctgtagatgctgctaaagcttacaaagattatctagctagtgggggacaaccaatcactaattgtgttaagatgttgtgtacacacactggtactggtcaggcaataacagttacaccggaagccaatatggatcaagaatcctttggtggtgcatcgtgttgtctgtactgccgttgccacatagatcatccaaatcctaaaggattttgtgacttaaaaggtaagtatgtacaaatacctacaacttgtgctaatgaccctgtgggttttacacttaaaaacacagtctgtaccgtctgcggtatgtggaaaggttatggctgtagttgtgatcaactccgcgaacccatgcttcagtcagctgatgcacaatcgtttttaaacgggtttgcggtgtaagtgcagcccgtcttacaccgtgcggcacaggcactagtactgatgtcgtatacagggcttttgacatctacaatgataaagtagctggttttgctaaattcctaaaaactaattgttgtcgcttccaagaaaaggacgaagatgacaatttaattgattcttactttgtagttaagagacacactttctctaactaccaacatgaagaaacaatttataatttacttaaggattgtccagctgttgctaaacatgacttctttaagtttagaatagacggtgacatggtaccacatatatcacgtcaacgtcttactaaatacacaatggcagacctcgtctatgctttaaggcattttgatgaaggtaattgtgacacattaaaagaaatacttgtcacatacaattgttgtgatgatgattatttcaataaaaaggactggtatgattttgtagaaaacccagatatattacgcgtatacgccaacttaggtgaacgtgtacgccaagctttgttaaaaacagtacaattctgtgatgccatgcgaaatgctggtattgttggtgtactgacattagataatcaagatctcaatggtaactggtatgatttcggtgatttcatacaaaccacgccaggtagtggagttcctgttgtagattcttattattcattgttaatgcctatattaaccttgaccagggctttaactgcagagtcacatgttgacactgacttaacaaagccttacattaagtgggatttgttaaaatatgacttcacggaagagaggttaaaactctttgaccgttattttaaatattgggatcagacataccacccaaattgtgttaactgtttggatgacagatgcattctgcattgtgcaaactttaatgttttattctctacagtgttcccacctacaagttttggaccactagtgagaaaaatatttgttgatggtgttccatttgtagtttcaactggataccacttcagagagctaggtgttgtacataatcaggatgtaaacttacatagctctagacttagttttaaggaattacttgtgtatgctgctgaccctgctatgcacgctgcttctggtaatctattactagataaacgcactacgtgcttttcagtagctgcacttactaacaatgttgcttttcaaactgtcaaacccggtaattttaacaaagacttctatgactttgctgtgtctaagggtttctttaaggaaggaagttctgttgaattaaaacacttcttctttgctcaggatggtaatgctgctatcagcgattatgactactatcgttataatctaccaacaatgtgtgatatcagacaactactatttgtagttgaagttgttgataagtactttgattgttacgatggtggctgtattaatgctaaccaagtcatcgtcaacaacctagacaaatcagctggttttccatttaataaatggggtaaggctagactttattatgattcaatgagttatgaggatcaagatgcacttttcgcatatacaaaacgtaatgtcatccctactataactcaaatgaatcttaagtatgccattagtgcaaagaatagagctcgcaccgtagctggtgtctctatctgtagtactatgaccaatagacagtttcatcaaaaattattgaaatcaatagccgccactagaggagctactgtagtaattggaacaagcaaattctatggtggttggcacaacatgttaaaaactgtttatagtgatgtagaaaaccctcaccttatgggttgggattatcctaaatgtgatagagccatgcctaacatgcttagaattatggcctcacttgttcttgctcgcaaacatacaacgtgttgtagcttgtcacaccgtttctatagattagctaatgagtgtgctcaagtattgagtgaaatggtcatgtgtggcggttcactatatgttaaaccaggtggaacctcatcaggagatgccacaactgcttatgctaatagtgtttttaacatttgtcaagctgtcacggccaatgttaatgcacttttatctactgatggtaacaaaattgccgataagtatgtccgcaatttacaacacagactttatgagtgtctctatagaaatagagatgttgacacagactttgtgaatgagttttacgcatatttgcgtaaacatttctcaatgatgatactctctgacgatgctgttgtgtgtttcaatagcacttatgcatctcaaggtctagtggctagcataaagaactttaagtcagttctttattatcaaaacaatgtttttatgtctgaagcaaaatgttggactgagactgaccttactaaaggacctcatgaattttgctctcaacatacaatgctagttaaacagggtgatgattatgtgtaccttccttacccagatccatcaagaatcctaggggccggctgttttgtagatgatatcgtaaaaacagatggtacacttatgattgaacggttcgtgtctttagctatagatgcttacccacttactaaacatcctaatcaggagtatgctgatgtctttcatttgtacttacaatacataagaaagctacatgatgagttaacaggacacatgttagacatgtattctgttatgcttactaatgataacacttcaaggtattgggaacctgagttttatgaggctatgtacacaccgcatacagtcttacaggctgttggggcttgtgttctttgcaattcacagacttcattaagatgtggtgcttgcatacgtagaccattcttatgttgtaaatgctgttacgaccatgtcatatcaacatcacataaattagtcttgtctgttaatccgtatgtttgcaatgctccaggttgtgatgtcacagatgtgactcaactttacttaggaggtatgagctattattgtaaatcacataaaccacccattagttttccattgtgtgctaatggacaagtttttggtttatataaaaatacatgtgttggtagcgataatgttactgactttaatgcaattgcaacatgtgactggacaaatgctggtgattacattttagctaacacctgtactgaaagactcaagctttttgcagcagaaacgctcaaagctactgaggagacatttaaactgtcttatggtattgctactgtacgtgaagtgctgtctgacagagaattacatctttcatgggaagttggtaaacctagaccaccacttaaccgaaattatgtctttactggttatcgtgtaactaaaaacagtaaagtacaaataggagagtacacctttgaaaaaggtgactatggtgatgctgttgtttaccgaggtacaacaacttacaaattaaatgttggtgattattttgtgctgacatcacatacagtaatgccattaagtgcacctacactagtgccacaagagcactatgttagaattactggcttatacccaacactcaatatctcagatgagttttctagcaatgttgcaaattatcaaaaggttggtatgcaaaagtattctacactccagggaccacctggtactggtaagagtcattttgctattggcctagctctctactacccttctgctcgcatagtgtatacagcttgctctcatgccgctgttgatgcactatgtgagaaggcattaaaatatttgcctatagataaatgtagtagaattatacctgcacgtgctcgtgtagagtgttttgataaattcaaagtgaattcaacattagaacagtatgtcttttgtactgtaaatgcattgcctgagacgacagcagatatagttgtctttgatgaaatttcaatggccacaaattatgatttgagtgttgtcaatgccagattacgtgctaagcactatgtgtacattggcgaccctgctcaattacctgcaccacgcacattgctaactaagggcacactagaaccagaatatttcaattcagtgtgtagacttatgaaaactataggtccagacatgttcctcggaacttgtcggcgttgtcctgctgaaattgttgacactgtgagtgctttggtttatgataataagcttaaagcacataaagacaaatcagctcaatgctttaaaatgttttataagggtgttatcacgcatgatgtttcatctgcaattaacaggccacaaataggcgtggtaagagaattccttacacgtaaccctgcttggagaaaagctgtctttatttcaccttataattcacagaatgctgtagcctcaaagattttgggactaccaactcaaactgttgattcatcacagggctcagaatatgactatgtcatattcactcaaaccactgaaacagctcactcttgtaatgtaaacagatttaatgttgctattaccagagcaaaagtaggcatactttgcataatgtctgatagagacctttatgacaagttgcaatttacaagtcttgaaattccacgtaggaatgtggcaactttacaagctgaaaatgtaacaggactctttaaagattgtagtaaggtaatcactgggttacatcctacacaggcacctacacacctcagtgttgacactaaattcaaaactgaaggtttatgtgttgacatacctggcatacctaaggacatgacctatagaagactcatctctatgatgggttttaaaatgaattatcaagttaatggttaccctaacatgtttatcacccgcgaagaagctataagacatgtacgtgcatggattggcttcgatgtcgaggggtgtcatgctactagagaagctgttggtaccaatttacctttacagctaggtttttctacaggtgttaacctagttgctgtacctacaggttatgttgatacacctaataatacagatttttccagagttagtgctaaaccaccgcctggagatcaatttaaacacctcataccacttatgtacaaaggacttccttggaatgtagtgcgtataaagattgtacaaatgttaagtgacacacttaaaaatctctctgacagagtcgtatttgtcttatgggcacatggctttgagttgacatctatgaagtattttgtgaaaataggacctgagcgcacctgttgtctatgtgatagacgtgccacatgcttttccactgcttcagacacttatgcctgttggcatcattctattggatttgattacgtctataatccgtttatgattgatgttcaacaatggggttttacaggtaacctacaaagcaaccatgatctgtattgtcaagtccatggtaatgcacatgtagctagttgtgatgcaatcatgactaggtgtctagctgtccacgagtgctttgttaagcgtgttgactggactattgaatatcctataattggtgatgaactgaagattaatgcggcttgtagaaaggttcaacacatggttgttaaagctgcattattagcagacaaattcccagttcttcacgacattggtaaccctaaagctattaagtgtgtacctcaagctgatgtagaatggaagttctatgatgcacagccttgtagtgacaaagcttataaaatagaagaattattctattcttatgccacacattctgacaaattcacagatggtgtatgcctattttggaattgcaatgtcgatagatatcctgctaattccattgtttgtagatttgacactagagtgctatctaaccttaacttgcctggttgtgatggtggcagtttgtatgtaaataaacatgcattccacacaccagcttttgataaaagtgcttttgttaatttaaaacaattaccatttttctattactctgacagtccatgtgagtctcatggaaaacaagtagtgtcagatatagattatgtaccactaaagtctgctacgtgtataacacgttgcaatttaggtggtgctgtctgtagacatcatgctaatgagtacagattgtatctcgatgcttataacatgatgatctcagctggctttagcttgtgggtttacaaacaatttgatacttataacctctggaacacttttacaagacttcagagtttagaaaatgtggcttttaatgttgtaaataagggacactttgatggacaacagggtgaagtaccagtttctatcattaataacactgtttacacaaaagttgatggtgttgatgtagaattgtttgaaaataaaacaacattacctgttaatgtagcatttgagctttgggctaagcgcaacattaaaccagtaccagaggtgaaaatactcaataatttgggtgtggacattgctgctaatactgtgatctgggactacaaaagagatgctccagcacatatatctactattggtgtttgttctatgactgacatagccaagaaaccaactgaaacgatttgtgcaccactcactgtcttttttgatggtagagttgatggtcaagtagacttatttagaaatgcccgtaatggtgttcttattacagaaggtagtgttaaaggtttacaaccatctgtaggtcccaaacaagctagtcttaatggagtcacattaattggagaagccgtaaaaacacagttcaattattataagaaagttgatggtgttgtccaacaattacctgaaacttactttactcagagtagaaatttacaagaatttaaacccaggagtcaaatggaaattgatttcttagaattagctatggatgaattcattgaacggtataaattagaaggctatgccttcgaacatatcgtttatggagattttagtcatagtcagttaggtggtttacatctactgattggactagctaaacgttttaaggaatcaccttttgaattagaagattttattcctatggacagtacagttaaaaactatttcataacagatgcgcaaacaggttcatctaagtgtgtgtgttctgttattgatttattacttgatgattttgttgaaataataaaatcccaagatttatctgtagtttctaaggttgtcaaagtgactattgactatacagaaatttcatttatgctttggtgtaaagatggccatgtagaaacattttacccaaaattacaatctagtcaagcgtggcaaccgggtgttgctatgcctaatctttacaaaatgcaaagaatgctattagaaaagtgtgaccttcaaaattatggtgatagtgcaacattacctaaaggcataatgatgaatgtcgcaaaatatactcaactgtgtcaatatttaaacacattaacattagctgtaccctataatatgagagttatacattttggtgctggttctgataaaggagttgcaccaggtacagctgttttaagacagtggttgcctacgggtacgctgcttgtcgattcagatcttaatgactttgtctctgatgcagattcaactttgattggtgattgtgcaactgtacatacagctaataaatgggatctcattattagtgatatgtacgaccctaagactaaaaatgttacaaaagaaaatgactctaaagagggttttttcacttacatttgtgggtttatacaacaaaagctagctcttggaggttccgtggctataaagataacagaacattcttggaatgctgatctttataagctcatgggacacttcgcatggtggacagcctttgttactaatgtgaatgcgtcatcatctgaagcatttttaattggatgtaattatcttggcaaaccacgcgaacaaatagatggttatgtcatgcatgcaaattacatattttggaggaatacaaatccaattcagttgtcttcctattctttatttgacatgagtaaatttccccttaaattaaggggtactgctgttatgtctttaaaagaaggtcaaatcaatgatatgattttatctcttcttagtaaaggtagacttataattagagaaaacaacagagttgttatttctagtgatgttcttgttaacaactaaacgaacaatgtttgtttttcttgttttattgccactagtctctagtcagtgtgttaatcttacaaccagaactcaattaccccctgcatacactaattctttcacacgtggtgtttattaccctgacaaagttttcagatcctcagttttacattcaactcaggacttgttcttacctttcttttccaatgttacttggttccatgctatacatgtctctgggaccaatggtactaagaggtttgataaccctgtcctaccatttaatgatggtgtttattttgcttccactgagaagtctaacataataagaggctggatttttggtactactttagattcgaagacccagtccctacttattgttaataacgctactaatgttgttattaaagtctgtgaatttcaattttgtaatgatccatttttgggtgtttattaccacaaaaacaacaaaagttggatggaaagtgagttcagagtttattctagtgcgaataattgcacttttgaatatgtctctcagccttttcttatggaccttgaaggaaaacagggtaatttcaaaaatcttagggaatttgtgtttaagaatattgatggttattttaaaatatattctaagcacacgcctattaatttagtgcgtgatctcccccagggtttttcggctttagaaccattggtagatttgccaataggtattaacatcactaggtttcaaactttacttgctttacatagaagttatttgactcctggtgattcttcttcaggttggacagctggtgctgcagcttattatgtgggttatcttcaacctaggacttttctattaaaatataatgaaaatggaaccattacagatgctgtagactgtgcacttgaccctctctcagaaacaaagtgtacgttgaaatccttcactgtagaaaaaggaatctatcaaacttctaactttagagtccaaccaacagaatctattgttagatttcctaatattacaaacttgtgcccttttggtgaagtttttaacgccaccagatttgcatctgtttatgcttggaacaggaagagaatcagcaactgtgttgctgattattctgtcctatataattccgcatcattttccacttttaagtgttatggagtgtctcctactaaattaaatgatctctgctttactaatgtctatgcagattcatttgtaattagaggtgatgaagtcagacaaatcgctccagggcaaactggaaagattgctgattataattataaattaccagatgattttacaggctgcgttatagcttggaattctaacaatcttgattctaaggttggtggtaattataattacctgtatagattgtttaggaagtctaatctcaaaccttttgagagagatatttcaactgaaatctatcaggccggtagcacaccttgtaatggtgttgaaggttttaattgttactttcctttacaatcatatggtttccaacccactaatggtgttggttaccaaccatacagagtagtagtactttcttttgaacttctacatgcaccagcaactgtttgtggacctaaaaagtctactaatttggttaaaaacaaatgtgtcaatttcaacttcaatggtttaacaggcacaggtgttcttactgagtctaacaaaaagtttctgcctttccaacaatttggcagagacattgctgacactactgatgctgtccgtgatccacagacacttgagattcttgacattacaccatgttcttttggtggtgtcagtgttataacaccaggaacaaatacttctaaccaggttgctgttctttatcaggatgttaactgcacagaagtccctgttgctattcatgcagatcaacttactcctacttggcgtgtttattctacaggttctaatgtttttcaaacacgtgcaggctgtttaataggggctgaacatgtcaacaactcatatgagtgtgacatacccattggtgcaggtatatgcgctagttatcagactcagactaattctcctcggcgggcacgtagtgtagctagtcaatccatcattgcctacactatgtcacttggtgcagaaaattcagttgcttactctaataactctattgccatacccacaaattttactattagtgttaccacagaaattctaccagtgtctatgaccaagacatcagtagattgtacaatgtacatttgtggtgattcaactgaatgcagcaatcttttgttgcaatatggcagtttttgtacacaattaaaccgtgctttaactggaatagctgttgaacaagacaaaaacacccaagaagtttttgcacaagtcaaacaaatttacaaaacaccaccaattaaagattttggtggttttaatttttcacaaatattaccagatccatcaaaaccaagcaagaggtcatttattgaagatctacttttcaacaaagtgacacttgcagatgctggcttcatcaaacaatatggtgattgccttggtgatattgctgctagagacctcatttgtgcacaaaagtttaacggccttactgttttgccacctttgctcacagatgaaatgattgctcaatacacttctgcactgttagcgggtacaatcacttctggttggacctttggtgcaggtgctgcattacaaataccatttgctatgcaaatggcttataggtttaatggtattggagttacacagaatgttctctatgagaaccaaaaattgattgccaaccaatttaatagtgctattggcaaaattcaagactcactttcttccacagcaagtgcacttggaaaacttcaagatgtggtcaaccaaaatgcacaagctttaaacacgcttgttaaacaacttagctccaattttggtgcaatttcaagtgttttaaatgatatcctttcacgtcttgacaaagttgaggctgaagtgcaaattgataggttgatcacaggcagacttcaaagtttgcagacatatgtgactcaacaattaattagagctgcagaaatcagagcttctgctaatcttgctgctactaaaatgtcagagtgtgtacttggacaatcaaaaagagttgatttttgtggaaagggctatcatcttatgtccttccctcagtcagcacctcatggtgtagtcttcttgcatgtgacttatgtccctgcacaagaaaagaacttcacaactgctcctgccatttgtcatgatggaaaagcacactttcctcgtgaaggtgtctttgtttcaaatggcacacactggtttgtaacacaaaggaatttttatgaaccacaaatcattactacagacaacacatttgtgtctggtaactgtgatgttgtaataggaattgtcaacaacacagtttatgatcctttgcaacctgaattagactcattcaaggaggagttagataaatattttaagaatcatacatcaccagatgttgatttaggtgacatctctggcattaatgcttcagttgtaaacattcaaaaagaaattgaccgcctcaatgaggttgccaagaatttaaatgaatctctcatcgatctccaagaacttggaaagtatgagcagtatataaaatggccatggtacatttggctaggttttatagctggcttgattgccatagtaatggtgacaattatgctttgctgtatgaccagttgctgtagttgtctcaagggctgttgttcttgtggatcctgctgcaaatttgatgaagacgactctgagccagtgctcaaaggagtcaaattacattacacataaacgaacttatggatttgtttatgagaatcttcacaattggaactgtaactttgaagcaaggtgaaatcaaggatgctactccttcagattttgttcgcgctactgcaacgataccgatacaagcctcactccctttcggatggcttattgttggcgttgcacttcttgctgtttttcagagcgcttccaaaatcataaccctcaaaaagagatggcaactagcactctccaagggtgttcactttgtttgcaacttgctgttgttgtttgtaacagtttactcacaccttttgctcgttgctgctggccttgaagccccttttctctatctttatgctttagtctacttcttgcagagtataaactttgtaagaataataatgaggctttggctttgctggaaatgccgttccaaaaacccattactttatgatgccaactattttctttgctggcatactaattgttacgactattgtataccttacaatagtgtaacttcttcaattgtcattacttcaggtgatggcacaacaagtcctatttctgaacatgactaccagattggtggttatactgaaaaatgggaatctggagtaaaagactgtgttgtattacacagttacttcacttcagactattaccagctgtactcaactcaattgagtacagacactggtgttgaacatgttaccttcttcatctacaataaaattgttgatgagcctgaagaacatgtccaaattcacacaatcgacggttcatccggagttgttaatccagtaatggaaccaatttatgatgaaccgacgacgactactagcgtgcctttgtaagcacaagctgatgagtacgaacttatgtactcattcgtttcggaagagacaggtacgttaatagttaatagcgtacttctttttcttgctttcgtggtattcttgctagttacactagccatccttactgcgcttcgattgtgtgcgtactgctgcaatattgttaacgtgagtcttgtaaaaccttctttttacgtttactctcgtgttaaaaatctgaattcttctagagttcctgatcttctggtctaaacgaactaaatattatattagtttttctgtttggaactttaattttagccatggcagattccaacggtactattaccgttgaagagcttaaaaagctccttgaacaatggaacctagtaataggtttcctattccttacatggatttgtcttctacaatttgcctatgccaacaggaataggtttttgtatataattaagttaattttcctctggctgttatggccagtaactttagcttgttttgtgcttgctgctgtttacagaataaattggatcaccggtggaattgctatcgcaatggcttgtcttgtaggcttgatgtggctcagctacttcattgcttctttcagactgtttgcgcgtacgcgatccatgtggtcattcaatccagaaactaacattcttctcaacgtgccactccatggcactattctgaccagaccgcttctagaaagtgaactcgtaatcggagctgtgatccttcgtggacatcttcgtattgctggacaccatctaggacgctgtgacatcaaggacctgcctaaagaaatcactgttgctacatcacgaacgctttcttattacaaattgggagcttcgcagcgtgtagcaggtgactcaggttttgctgcatacagtcgctacaggattggcaactataaattaaacacagaccattccagtagcagtgacaatattgctttgcttgtacagtaagtgacaacagatgtttcatctcgttgactttcaggttactatagcagagatattactaattattatgaggacttttaaagtttccatttggaatcttgattacatcataaacctcataattaaaaatttatctaagtcactaactgagaataaatattctcaattagatgaagagcaaccaatggagattgattaaacgaacatgaaaattattcttttcttggcactgataacactcgctacttgtgagctttatcactaccaagagtgtgttagaggtacaacagtacttttaaaagaaccttgctcttctggaacatacgagggcaattcaccatttcatcctctagctgataacaaatttgcactgacttgctttagcactcaatttgcttttgcttgtcctgacggcgtaaaacacgtctatcagttacgtgccagatcagtttcacctaaactgttcatcagacaagaggaagttcaagaactttactctccaatttttcttattgttgcggcaatagtgtttataacactttgcttcacactcaaaagaaagacagaatgattgaactttcattaattgacttctatttgtgctttttagcctttctgctattccttgttttaattatgcttattatcttttggttctcacttgaactgcaagatcataatgaaacttgtcacgcctaaacgaacatgaaatttcttgttttcttaggaatcatcacaactgtagctgcatttcaccaagaatgtagtttacagtcatgtactcaacatcaaccatatgtagttgatgacccgtgtcctattcacttctattctaaatggtatattagagtaggagctagaaaatcagcacctttaattgaattgtgcgtggatgaggctggttctaaatcacccattcagtacatcgatatcggtaattatacagtttcctgtttaccttttacaattaattgccaggaacctaaattgggtagtcttgtagtgcgttgttcgttctatgaagactttttagagtatcatgacgttcgtgttgttttagatttcatctaaacgaacaaactaaaatgtctgataatggaccccaaaatcagcgaaatgcaccccgcattacgtttggtggaccctcagattcaactggcagtaaccagaatggagaacgcagtggggcgcgatcaaaacaacgtcggccccaaggtttacccaataatactgcgtcttggttcaccgctctcactcaacatggcaaggaagaccttaaattccctcgaggacaaggcgttccaattaacaccaatagcagtccagatgaccaaattggctactaccgaagagctaccagacgaattcgtggtggtgacggtaaaatgaaagatctcagtccaagatggtatttctactacctaggaactgggccagaagctggacttccctatggtgctaacaaagacggcatcatatgggttgcaactgagggagccttgaatacaccaaaagatcacattggcacccgcaatcctgctaacaatgctgcaatcgtgctacaacttcctcaaggaacaacattgccaaaaggcttctacgcagaagggagcagaggcggcagtcaagcctcttctcgttcctcatcacgtagtcgcaacagttcaagaaattcaactccaggcagcagtaggggaacttctcctgctagaatggctggcaatggcggtgatgctgctcttgctttgctgctgcttgacagattgaaccagcttgagagcaaaatgtctggtaaaggccaacaacaacaaggccaaactgtcactaagaaatctgctgctgaggcttctaagaagcctcggcaaaaacgtactgccactaaagcatacaatgtaacacaagctttcggcagacgtggtccagaacaaacccaaggaaattttggggaccaggaactaatcagacaaggaactgattacaaacattggccgcaaattgcacaatttgcccccagcgcttcagcgttcttcggaatgtcgcgcattggcatggaagtcacaccttcgggaacgtggttgacctacacaggtgccatcaaattggatgacaaagatccaaatttcaaagatcaagtcattttgctgaataagcatattgacgcatacaaaacattcccaccaacagagcctaaaaaggacaaaaagaagaaggctgatgaaactcaagccttaccgcagagacagaagaaacagcaaactgtgactcttcttcctgctgcagatttggatgatttctccaaacaattgcaacaatccatgagcagtgctgactcaactcaggcctaaactcatgcagaccacacaaggcagatgggctatataaacgttttcgcttttccgtttacgatatatagtctactcttgtgcagaatgaattctcgtaactacatagcacaagtagatgtagttaactttaatctcacatagcaatctttaatcagtgtgtaacattagggaggacttgaaagagccaccacattttcaccgaggccacgcggagtacgatcgagtgtacagtgaacaatgctagggagagctgcctatatggaagagccctaatgtgtaaaattaattttagtagtgctatccccatgtgattttaatagcttcttaggagaatgacaaaaaaaaaaaaaaaaaaaaaaaaaaaaaaaaaaaaaaaaaaaaaaaaaaaaaaaaaaagggtcggcatggcatctccacctcctcgcggtccgacctgggcatccgaaggaggacgcacgtccactcggatggctaagggagcagcacactggcggccgttactagggccgcgcccttcccaacagttgcgcagcctgaatggcgaatggagatccaatttttaagtgtataatgtgttaaactactgattctaattgtttgtgtattttagattcacagtcccaaggctcatttcaggcccctcagtcctcacagtctgttcatgatcataatcagccataccacatttgtagaggttttacttgctttaaaaaacctcccacacctccccctgaacctgaaacataaaatgaatgcaattgttgttgttaacttgtttattgcagcttataatggttacaaataaagcaatagcatcacaaatttcacaaataaagcatttttttcactgcattctagttgtggtttgtccaaactcatcaatgtatcttaaagcttgagtattctatagtctcacctaaatagcttggcgtaatcatggtcatagctgtttcctgtgtgaaattgttatccgctcacaattccacacaacatacgagccggaagcataaagtgtaaagcctggggtgcctaatgagtgagctaactcacattaattgcgttgcgctcactgcccgctttccagtcgggaaacctgtcgtgccagctgcattaatgaatcggccaacgcgaaccccttgcggccgcccgggccgtcgaccaattctcatgtttgacagcttatcatcgaatttctgccattcatccgcttattatcacttattcaggcgtagcaaccaggcgtttaagggcaccaataactgccttaaaaaaattacgccccgccctgccactcatcgcagtactgttgtaattcattaagcattctgccgacatggaagccatcacaaacggcatgatgaacctgaatcgccagcggcatcagcaccttgtcgccttgcgtataatatttgcccatggtgaaaacgggggcgaagaagttgtccatattggccacgtttaaatcaaaactggtgaaactcacccagggattggctgagacgaaaaacatattctcaataaaccctttagggaaataggccaggttttcaccgtaacacgccacatcttgcgaatatatgtgtagaaactgccggaaatcgtcgtggtattcactccagagcgatgaaaacgtttcagtttgctcatggaaaacggtgtaacaagggtgaacactatcccatatcaccagctcaccgtctttcattgccatacgaaattccggatgagcattcatcaggcgggcaagaatgtgaataaaggccggataaaacttgtgcttatttttctttacggtctttaaaaaggccgtaatatccagctgaacggtctggttataggtacattgagcaactgactgaaatgcctcaaaatgttctttacgatgccattgggatatatcaacggtggtatatccagtgatttttttctccattttagcttccttagctcctgaaaatctcgataactcaaaaaatacgcccggtagtgatcttatttcattatggtgaaagttggaacctcttacgtgccgatcaacgtctcattttcgccaaaagttggcccagggcttcccggtatcaacagggacaccaggatttatttattctgcgaagtgatcttccgtcacaggtatttattcgcgataagctcatggagcggcgtaaccgtcgcacaggaaggacagagaaagcgcggatctgggaagtgacggacagaacggtcaggacctggattggggaggcggttgccgccgctgctgctgacggtgtgacgttctctgttccggtcacaccacatacgttccgccattcctatgcgatgcacatgctgtatgccggtataccgctgaaagttctgcaaagcctgatgggacataagtccatcagttcaacggaagtctacacgaaggtttttgcgctggatgtggctgcccggcaccgggtgcagtttgcgatgccggagtctgatgcggttgcgatgctgaaacaattatcctgagaataaatgccttggcctttatatggaaatgtggaactgagtggatatgctgtttttgtctgttaaacagagaagctggctgttatccactgagaagcgaacgaaacagtcgggaaaatctcccattatcgtagagatccgcattattaatctcaggagcctgtgtagcgtttataggaagtagtgttctgtcatgatgcctgcaagcggtaacgaaaacgatttgaatatgccttcaggaacaatagaaatcttcgtgcggtgttacgttgaagtggagcggattatgtcagcaatggacagaacaacctaatgaacacagaaccatgatgtggtctgtccttttacagccagtagtgctcgccgcagtcgagcgacagggcgaagccctcggctggttgccctcgccgctgggctggcggccgtctatggccctgcaaacgcgccagaaacgccgtcgaagccgtgtgcgagacaccgcggccggccgccggcgttgtggatacctcgcggaaaacttggccctcactgacagatgaggggcggacgttgacacttgaggggccgactcacccggcgcggcgttgacagatgaggggcaggctcgatttcggccggcgacgtggagctggccagcctcgcaaatcggcgaaaacgcctgattttacgcgagtttcccacagatgatgtggacaagcctggggataagtgccctgcggtattgacacttgaggggcgcgactactgacagatgaggggcgcgatccttgacacttgaggggcagagtgctgacagatgaggggcgcacctattgacatttgaggggctgtccacaggcagaaaatccagcatttgcaagggtttccgcccgtttttcggccaccgctaacctgtcttttaacctgcttttaaaccaatatttataaaccttgtttttaaccagggctgcgccctgtgcgcgtgaccgcgcacgccgaaggggggtgcccccccttctcgaaccctcccggtcgagtgagcgaggaagcaccagggaacagcacttatatattctgcttacacacgatgcctgaaaaaacttcccttggggttatccacttatccacggggatatttttataattattttttttatagtttttagatcttcttttttagagcgccttgtaggcctttatccatgctggttctagagaaggtgttgtgacaaattgccctttcagtgtgacaaatcaccctcaaatgacagtcctgtctgtgacaaattgcccttaaccctgtgacaaattgccctcagaagaagctgttttttcacaaagttatccctgcttattgactcttttttatttagtgtgacaatctaaaaacttgtcacacttcacatggatctgtcatggcggaaacagcggttatcaatcacaagaaacgtaaaaatagcccgcgaatcgtccagtcaaacgacctcactgaggcggcatatagtctctcccgggatcaaaaacgtatgctgtatctgttcgttgaccagatcagaaaatctgatggcaccctacaggaacatgacggtatctgcgagatccatgttgctaaatatgctgaaatattcggattgacctctgcggaagccagtaaggatatacggcaggcattgaagagtttcgcggggaaggaagtggttttttatcgccctgaagaggatgccggcgatgaaaaaggctatgaatcttttccttggtttatcaaacgtgcgcacagtccatccagagggctttacagtgtacatatcaacccatatctcattcccttctttatcgggttacagaaccggtttacgcagtttcggcttagtgaaacaaaagaaatcaccaatccgtatgccatgcgtttatacgaatccctgtgtcagtatcgtaagccggatggctcaggcatcgtctctctgaaaatcgactggatcatagagcgttaccagctgcctcaaagttaccagcgtatgcctgacttccgccgccgcttcctgcaggtctgtgttaatgagatcaacagcagaactccaatgcgcctctcatacattgagaaaaagaaaggccgccagacgactcatatcgtattttccttccgcgatatcacttccatgacgacaggatagtctgagggttatctgtcacagatttgagggtggttcgtcacatttgttctgacctactgagggtaatttgtcacagttttgctgtttccttcagcctgcatggattttctcatactttttgaactgtaatttttaaggaagccaaatttgagggcagtttgtcacagttgatttccttctctttcccttcgtcatgtgacctgatatcgggggttagttcgtcatcattgatgagggttgattatcacagtttattactctgaattggctatccgcgtgtgtacctctacctggagtttttcccacggtggatatttcttcttgcgctgagcgtaagagctatctgacagaacagttcttctttgcttcctcgccagttcgctcgctatgctcggttacacggctgcggcg

SEQ ID NO: 27 - DNA, 35283 bp, Artificial Sequence
  Clone pCCI-4K-SARS-CoV-2-WWDWW. Based on SARS-CoV-2.
gatgtgctgcaaggcgattaagttgggtaacgccagggttttcccagtcacgacgttgtaaaacgacggccagtgaattgtaatacgactcactatagggcgaattctagttattaatagtaatcaattacggggtcattagttcatagcccatatatggagttccgcgttacataacttacggtaaatggcccgcctggctgaccgcccaacgacccccgcccattgacgtcaataatgacgtatgttcccatagtaacgccaatagggactttccattgacgtcaatgggtggagtatttacggtaaactgcccacttggcagtacatcaagtgtatcatatgccaagtacgccccctattgacgtcaatgacggtaaatggcccgcctggcattatgcccagtacatgaccttatgggactttcctacttggcagtacatctacgtattagtcatcgctattaccatggtgatgcggttttggcagtacatcaatgggcgtggatagcggtttgactcacggggatttccaagtctccaccccattgacgtcaatgggagtttgttttggcaccaaaatcaacgggactttccaaaatgtcgtaacaactccgccccattgacgcaaatgggcggtaggcgtgtacggtgggaggtctatataagcagagctggtttagtgaaccgtattaaaggtttataccttcccaggtaacaaaccaaccaactttcgatctcttgtagatctgttctctaaacgaactttaaaatctgtgtggctgtcactcggctgcatgcttagtgcactcacgcagtataattaataactaattactgtcgttgacaggacacgagtaactcgtctatcttctgcaggctgcttacggtttcgtccgtgttgcagccgatcatcagcacatctaggtttcgtccgggtgtgaccgaaaggtaagatggagagccttgtccctggtttcaacgagaaaacacacgtccaactcagtttgcctgttttacaggttcgcgacgtgctcgtacgtggctttggagactccgtggaggaggtcttatcagaggcacgtcaacatcttaaagatggcacttgtggcttagtagaagttgaaaaaggcgttttgcctcaacttgaacagccctatgtgttcatcaaacgttcggatgctcgaactgcacctcatggtcatgttatggttgagctggtagcagaactcgaaggcattcagtacggtcgtagtggtgagacacttggtgtccttgtccctcatgtgggcgaaataccagtggcttaccgcaaggttcttcttcgtaagaacggtaataaaggagctggtggccatagttacggcgccgatctaaagtcatttgacttaggcgacgagcttggcactgatccttatgaagattttcaagaaaactggaacactaaacatagcagtggtgttacccgtgaactcatgcgtgagcttaacggaggggcatacactcgctatgtcgataacaacttctgtggccctgatggctaccctcttgagtgcattaaagaccttctagcacgtgctggtaaagcttcatgcactttgtccgaacaactggactttattgacactaagaggggtgtatactgctgccgtgaacatgagcatgaaattgcttggtacacggaacgttctgaaaagagctatgaattgcagacaccttttgaaattaaattggcaaagaaatttgacaccttcaatggggaatgtccaaattttgtatttcccttaaattccataatcaagactattcaaccaagggttgaaaagaaaaagcttgatggctttatgggtagaattcgatctgtctatccagttgcgtcaccaaatgaatgcaaccaaatgtgcctttcaactctcatgaagtgtgatcattgtggtgaaacttcatggcagacgggcgattttgttaaagccacttgcgaattttgtggcactgagaatttgactaaagaaggtgccactacttgtggttacttaccccaaaatgctgttgttaaaatttattgtccagcatgtcacaattcagaagtaggacctgagcatagtcttgccgaataccataatgaatctggcttgaaaaccattcttcgtaagggtggtcgcactattgcctttggaggctgtgtgttctcttatgttggttgccataacaagtgtgcctattgggtcccacgtgctagcgctaacataggttgtaaccatacaggtgttgttggagaaggttccgaaggtcttaatgacaaccttcttgaaatactccaaaaagagaaagtcaacatcaatattgttggtgactttaaacttaatgaagagatcgccattattttggcatctttttctgcttccacaagtgcttttgtggaaactgtgaaaggtttggattataaagcattcaaacaaattgttgaatcctgtggtaattttaaagttacaaaaggaaaagctaaaaaaggtgcctggaatattggtgaacagaaatcaatactgagtcctctttatgcatttgcatcagaggctgctcgtgttgtacgatcaattttctcccgcactcttgaaactgctcaaaattctgtgcgtgttttacagaaggccgctataacaatactagatggaatttcacagtattcactgagactcattgatgctatgatgttcacatctgatttggctactaacaatctagttgtaatggcctacattacaggtggtgttgttcagttgacttcgcagtggctaactaacatctttggcactgtttatgaaaaactcaaacccgtccttgattggcttgaagagaagtttaaggaaggtgtagagtttcttagagacggttgggaaattgttaaatttatctcaacctgtgcttgtgaaattgtcggtggacaaattgtcacctgtgcaaaggaaattaaggagagtgttcagacattctttaagcttgtaaataaatttttggctttgtgtgctgactctatcattattggtggagctaaacttaaagccttgaatttaggtgaaacatttgtcacgcactcaaagggattgtacagaaagtgtgttaaatccagagaagaaactggcctactcatgcctctaaaagccccaaaagaaattatcttcttagagggagaaacacttcccacagaagtgttaacagaggaagttgtcttgaaaactggtgatttacaaccattagaacaacctactagtgaagctgttgaagctccattggttggtacaccagtttgtattaacgggcttatgttgctcgaaatcaaagacacagaaaagtactgtgcccttgcacctaatatgatggtaacaaacaataccttcacactcaaaggcggtgcaccaacaaaggttacttttggtgatgacactgtgatagaagtgcaaggttacaagagtgtgaatatcacttttgaacttgatgaaaggattgataaagtacttaatgagaagtgctctgcctatacagttgaactcggtacagaagtaaatgagttcgcctgtgttgtggcagatgctgtcataaaaactttgcaaccagtatctgaattacttacaccactgggcattgatttagatgagtggagtatggctacatactacttatttgatgagtctggtgagtttaaattggcttcacatatgtattgttctttctaccctccagatgaggatgaagaagaaggtgattgtgaagaagaagagtttgagccatcaactcaatatgagtatggtactgaagatgattaccaaggtaaacctttggaatttggtgccacttctgctgctcttcaacctgaagaagagcaagaagaagattggttagatgatgatagtcaacaaactgttggtcaacaagacggcagtgaggacaatcagacaactactattcaaacaattgttgaggttcaacctcaattagagatggaacttacaccagttgttcagactattgaagtgaatagttttagtggttatttaaaacttactgacaatgtatacattaaaaatgcagacattgtggaagaagctaaaaaggtaaaaccaacagtggttgttaatgcagccaatgtttaccttaaacatggaggaggtgttgcaggagccttaaataaggctactaacaatgccatgcaagttgaatctgatgattacatagctactaatggaccacttaaagtgggtggtagttgtgttttaagcggacacaatcttgctaaacactgtcttcatgttgtcggcccaaatgttaacaaaggtgaagacattcaacttcttaagagtgcttatgaaaattttaatcagcacgaagttctacttgcaccattattatcagctggtatttttggtgctgaccctatacattctttaagagtttgtgtagatactgttcgcacaaatgtctacttagctgtctttgataaaaatctctatgacaaacttgtttcaagctttttggaaatgaagagtgaaaagcaagttgaacaaaagatcgctgagattcctaaagaggaagttaagccatttataactgaaagtaaaccttcagttgaacagagaaaacaagatgataagaaaatcaaagcttgtgttgaagaagttacaacaactctggaagaaactaagttcctcacagaaaacttgttactttatattgacattaatggcaatcttcatccagattctgccactcttgttagtgacattgacatcactttcttaaagaaagatgctccatatatagtgggtgatgttgttcaagagggtgttttaactgctgtggttatacctactaaaaaggctggtggcactactgaaatgctagcgaaagctttgagaaaagtgccaacagacaattatataaccacttacccgggtcagggtttaaatggttacactgtagaggaggcaaagacagtgcttaaaaagtgtaaaagtgccttttacattctaccatctattatctctaatgagaagcaagaaattcttggaactgtttcttggaatttgcgagaaatgcttgcacatgcagaagaaacacgcaaattaatgcctgtctgtgtggaaactaaagccatagtttcaactatacagcgtaaatataagggtattaaaatacaagagggtgtggttgattatggtgctagattttacttttacaccagtaaaacaactgtagcgtcacttatcaacacacttaacgatctaaatgaaactcttgttacaatgccacttggctatgtaacacatggcttaaatttggaagaagctgctcggtatatgagatctctcaaagtgccagctacagtttctgtttcttcacctgatgctgttacagcgtataatggttatcttacttcttcttctaaaacacctgaagaacattttattgaaaccatctcacttgctggttcctataaagattggtcctattctggacaatctacacaactaggtatagaatttcttaagagaggtgataaaagtgtatattacactagtaatcctaccacattccacctagatggtgaagttatcacctttgacaatcttaagacacttctttctttgagagaagtgaggactattaaggtgtttacaacagtagacaacattaacctccacacgcaagttgtggacatgtcaatgacatatggacaacagtttggtccaacttatttggatggagctgatgttactaaaataaaacctcataattcacatgaaggtaaaacattttatgttttacctaatgatgacactctacgtgttgaggcttttgagtactaccacacaactgatcctagttttctgggtaggtacatgtcagcattaaatcacactaaaaagtggaaatacccacaagttaatggtttaacttctattaaatgggcagataacaactgttatcttgccactgcattgttaacactccaacaaatagagttgaagtttaatccacctgctctacaagatgcttattacagagcaagggctggtgaagctgctaacttttgtgcacttatcttagcctactgtaataagacagtaggtgagttaggtgatgttagagaaacaatgagttacttgtttcaacatgccaatttagattcttgcaaaagagtcttgaacgtggtgtgtaaaacttgtggacaacagcagacaacccttaagggtgtagaagctgttatgtacatgggcacactttcttatgaacaatttaagaaaggtgttcagataccttgtacgtgtggtaaacaagctacaaaatatctagtacaacaggagtcaccttttgttatgatgtcagcaccacctgctcagtatgaacttaagcatggtacatttacttgtgctagtgagtacactggtaattaccagtgtggtcactataaacatataacttctaaagaaactttgtattgcatagacggtgctttacttacaaagtcctcagaatacaaaggtcctattacggatgttttctacaaagaaaacagttacacaacaaccataaaaccagttacttataaattggatggtgttgtttgtacagaaattgaccctaagttggacaattattataagaaagacaattcttatttcacagagcaaccaattgatcttgtaccaaaccaaccatatccaaacgcaagcttcgataattttaagtttgtatgtgataatatcaaatttgctgatgatttaaaccagttaactggttataagaaacctgcttcaagagagcttaaagttacatttttccctgacttaaatggtgatgtggtggctattgattataaacactacacaccctcttttaagaaaggagctaaattgttacataaacctattgtttggcatgttaacaatgcaactaataaagccacgtataaaccaaatacctggtgtatacgttgtctttggagcacaaaaccagttgaaacatcaaattcgtttgatgtactgaagtcagaggacgcgcagggaatggataatcttgcctgcgaagatctaaaaccagtctctgaagaagtagtggaaaatcctaccatacagaaagacgttcttgagtgtaatgtgaaaactaccgaagttgtaggagacattatacttaaaccagcaaataatagtttaaaaattacagaagaggttggccacacagatctaatggctgcttatgtagacaattctagtcttactattaagaaacctaatgaattatctagagtattaggtttgaaaacccttgctactcatggtttagctgctgttaatagtgtcccttgggatactatagctaattatgctaagccttttcttaacaaagttgttagtacaactactaacatagttacacggtgtttaaaccgtgtttgtactaattatatgccttatttctttactttattgctacaattgtgtacttttactagaagtacaaattctagaattaaagcatctatgccgactactatagcaaagaatactgttaagagtgtcggtaaattttgtctagaggcttcatttaattatttgaagtcacctaatttttctaaactgataaatattataatttggtttttactattaagtgtttgcctaggttcgttaatatattcgacggcggcgttaggtgtattaatgtcgaatttaggtatgccgtcgtattgtacgggttatcgtgaaggttatttaaattcgacgaatgtaacgatagcgacgtattgtacgggttcgataccgtgttcggtatgtctatcgggtttagattcgttagatacgtatccgtcgttagaaacgatacaaataacgatatcgtcgtttaaatgggatttaacggcgtttggtttagtagcggaatggtttttagcgtatatactatttacgcgatttttttatgtactaggtttagcggcgataatgcaattatttttttcgtattttgcggtacattttatttcgaattcgtggctaatgtggttaataataaatctagtacaaatggcgccgatatcggcgatggtacgtatgtatatattttttgcgtcgttttattatgtatggaaatcgtatgtacatgtagtagatggttgtaattcgtcgacgtgtatgatgtgttataaacgtaatcgtgcgacgcgagtagaatgtacgacgatagtaaatggtgtacgtcgttcgttttatgtatatgcgaatggtggtaaaggtttttgtaaactacataattggaattgtgtaaattgtgatacgttttgtgcgggttcgacgtttatatcggatgaagtagcgcgtgatttatcgctacaatttaaacgtccgataaatccgacggatcaatcgtcgtatatagtagattcggtaacggtaaaaaatggttcgatacatctatattttgataaagcgggtcaaaaaacgtatgaacgtcattcgctatcgcattttgtaaatttagataatctacgtgcgaataatacgaaaggttcgttaccgataaatgtaatagtatttgatggtaaatcgaaatgtgaagaatcgtcggcgaaatcggcgtcggtatattattcgcaactaatgtgtcaaccgatactattactagatcaagcgttagtatcggatgtaggtgattcggcggaagtagcggtaaaaatgtttgatgcgtatgtaaatacgttttcgtcgacgtttaatgtaccgatggaaaaactaaaaacgctagtagcgacggcggaagcggaactagcgaaaaatgtatctttagataatgtattatcgacgtttatatcggcggcgcgtcaaggttttgtagattcggatgtagaaacgaaagatgtagtagaatgtctaaaattatcgcatcaatcggatatagaagtaacgggtgattcgtgtaataattatatgctaacgtataataaagtagaaaatatgacgccgcgtgatctaggtgcgtgtatagattgttcggcgcgtcatataaatgcgcaagtagcgaaatcgcataatatagcgttaatatggaatgtaaaagattttatgtcgttatcggaacaactacgtaaacaaatacgttcggcggcgaaaaaaaataatttaccgtttaaattaacgtgtgcgacgacgcgacaagtagtaaatgtagtaacgacgaaaatagcgctaaaaggtggtaaaatagtaaataattggttaaaacaattaattaaagttacacttgtgttcctttttgttgctgctattttctatttaataacacctgttcatgtcatgtctaaacatactgacttttcaagtgaaatcataggatacaaggctattgatggtggtgtcactcgtgacatagcatctacagatacttgttttgctaacaaacatgctgattttgacacatggtttagccagcgtggtggtagttatactaatgacaaagcttgcccattgattgctgcagtcataacaagagaagtgggttttgtcgtgcctggtttgcctggcacgatattacgcacaactaatggtgactttttgcatttcttacctagagtttttagtgcagttggtaacatctgttacacaccatcaaaacttatagagtacactgactttgcaacatcagcttgtgttttggctgctgaatgtacaatttttaaagatgcttctggtaagccagtaccatattgttatgataccaatgtactagaaggttctgttgcttatgaaagtttacgccctgacacacgttatgtgctcatggatggctctattattcaatttcctaacacctaccttgaaggttctgttagagtggtaacaacttttgattctgagtactgtaggcacggcacttgtgaaagatcagaagctggtgtttgtgtatctactagtggtagatgggtacttaacaatgattattacagatctttaccaggagttttctgtggtgtagatgctgtaaatttacttactaatatgtttacaccactaattcaacctattggtgctttggacatatcagcatctatagtagctggtggtattgtagctatcgtagtaacatgccttgcctactattttatgaggtttagaagagcttttggtgaatacagtcatgtagttgcctttaatactttactattccttatgtcattcactgtactctgtttaacaccagtttactcattcttacctggtgtttattctgttatttacttgtacttgacattttatcttactaatgatgtttcttttttagcacatattcagtggatggttatgttcacacctttagtacctttctggataacaattgcttatatcatttgtatttccacaaagcatttctattggttctttagtaattacctaaagagacgtgtagtctttaatggtgtttcctttagtacttttgaagaagctgcgctgtgcacctttttgttaaataaagaaatgtatctaaagttgcgtagtgatgtgctattacctcttacgcaatataatagatacttagctctttataataagtacaagtattttagtggagcaatggatacaactagctacagagaagctgcttgttgtcatctcgcaaaggctctcaatgacttcagtaactcaggttctgatgttctttaccaaccaccacaaacctctatcacctcagctgttttgcagagtggttttagaaaaatggcattcccatctggtaaagttgagggttgtatggtacaagtaacttgtggtacaactacacttaacggtctttggcttgatgacgtagtttactgtccaagacatgtgatctgcacctctgaagacatgcttaaccctaattatgaagatttactcattcgtaagtctaatcataatttcttggtacaggctggtaatgttcaactcagggttattggacattctatgcaaaattgtgtacttaagcttaaggttgatacagccaatcctaagacacctaagtataagtttgttcgcattcaaccaggacagactttttcagtgttagcttgttacaatggttcaccatctggtgtttaccaatgtgctatgaggcccaatttcactattaagggttcattccttaatggttcatgtggtagtgttggttttaacatagattatgactgtgtctctttttgttacatgcaccatatggaattaccaactggagttcatgctggcacagacttagaaggtaacttttatggaccttttgttgacaggcaaacagcacaagcagctggtacggacacaactattacagttaatgttttagcttggttgtacgctgctgttataaatggagacaggtggtttctcaatcgatttaccacaactcttaatgactttaaccttgtggctatgaagtacaattatgaacctctaacacaagaccatgttgacatactaggacctctttctgctcaaactggaattgccgttttagatatgtgtgcttcattaaaagaattactgcaaaatggtatgaatggacgtaccatattgggtagtgctttattagaagatgaatttacaccttttgatgttgttagacaatgctcaggtgttactttccaaagtgcagtgaaaagaacaatcaagggtacacaccactggttgttactcacaattttgacttcacttttagttttagtccagagtactcaatggtctttgttcttttttttgtatgaaaatgcctttttaccttttgctatgggtattattgctatgtctgcttttgcaatgatgtttgtcaaacataagcatgcatttctctgtttgtttttgttaccttctcttgccactgtagcttattttaatatggtctatatgcctgctagttgggtgatgcgtattatgacatggttggatatggttgatactagtttgtctggttttaagctaaaagactgtgttatgtatgcatcagctgtagtgttactaatccttatgacagcaagaactgtgtatgatgatggtgctaggagagtgtggacacttatgaatgtcttgacactcgtttataaagtttattatggtaatgctttagatcaagccatttccatgtgggctcttataatctctgttacttctaactactcaggtgtagttacaactgtcatgtttttggccagaggtattgtttttatgtgtgttgagtattgccctattttcttcataactggtaatacacttcagtgtataatgctagtttattgtttcttaggctatttttgtacttgttactttggcctcttttgtttactcaaccgctactttagactgactcttggtgtttatgattacttagtttctacacaggagtttagatatatgaattcacagggactactcccacccaagaatagcatagatgccttcaaactcaacattaaattgttgggtgttggtggcaaaccttgtatcaaagtagccactgtacagtctaaaatgtcagatgtaaagtgcacatcagtagtcttactctcagttttgcaacaactcagagtagaatcatcatctaaattgtgggctcaatgtgtccagttacacaatgacattctcttagctaaagatactactgaagcctttgaaaaaatggtttcactactttctgttttgctttccatgcagggtgctgtagacataaacaagctttgtgaagaaatgctggacaacagggcaaccttacaagctatagcctcagagtttagttcccttccatcatatgcagcttttgctactgctcaagaagcttatgagcaggctgttgctaatggtgattctgaagttgttcttaaaaagttgaagaagtctttgaatgtggctaaatctgaatttgaccgtgatgcagccatgcaacgtaagttggaaaagatggctgatcaagctatgacccaaatgtataaacaggctagatctgaggacaagagggcaaaagttactagtgctatgcagacaatgcttttcactatgcttagaaagttggataatgatgcactcaacaacattatcaacaatgcaagagatggttgtgttcccttgaacataatacctcttacaacagcagccaaactaatggttgtcataccagactataacacatataaaaatacgtgtgatggtacaacatttacttatgcatcagcattgtgggaaatccaacaggttgtagatgcagatagtaaaattgttcaacttagtgaaattagtatggacaattcacctaatttagcatggcctcttattgtaacagctttaagggccaattctgctgtcaaattacagaataatgagcttagtcctgttgcactacgacagatgtcttgtgctgccggtactacacaaactgcttgcactgatgacaatgcgttagcttactacaacacaacaaagggaggtaggtttgtacttgcactgttatccgatttacaggatttgaaatgggctagattccctaagagtgatggaactggtactatctatacagaactggaaccaccttgtaggtttgttacagacacacctaaaggtcctaaagtgaagtatttatactttattaaaggattaaacaacctaaatagaggtatggtacttggtagtttagctgccacagtacgtctacaagctggtaatgcaacagaagtgcctgccaattcaactgtattatctttctgtgcttttgctgtagatgctgctaaagcttacaaagattatctagctagtgggggacaaccaatcactaattgtgttaagatgttgtgtacacacactggtactggtcaggcaataacagttacaccggaagccaatatggatcaagaatcctttggtggtgcatcgtgttgtctgtactgccgttgccacatagatcatccaaatcctaaaggattttgtgacttaaaaggtaagtatgtacaaatacctacaacttgtgctaatgaccctgtgggttttacacttaaaaacacagtctgtaccgtctgcggtatgtggaaaggttatggctgtagttgtgatcaactccgcgaacccatgcttcagtcagctgatgcacaatcgtttttaaacgggtttgcggtgtaagtgcagcccgtcttacaccgtgcggcacaggcactagtactgatgtcgtatacagggcttttgacatctacaatgataaagtagctggttttgctaaattcctaaaaactaattgttgtcgcttccaagaaaaggacgaagatgacaatttaattgattcttactttgtagttaagagacacactttctctaactaccaacatgaagaaacaatttataatttacttaaggattgtccagctgttgctaaacatgacttctttaagtttagaatagacggtgacatggtaccacatatatcacgtcaacgtcttactaaatacacaatggcagacctcgtctatgctttaaggcattttgatgaaggtaattgtgacacattaaaagaaatacttgtcacatacaattgttgtgatgatgattatttcaataaaaaggactggtatgattttgtagaaaacccagatatattacgcgtatacgccaacttaggtgaacgtgtacgccaagctttgttaaaaacagtacaattctgtgatgccatgcgaaatgctggtattgttggtgtactgacattagataatcaagatctcaatggtaactggtatgatttcggtgatttcatacaaaccacgccaggtagtggagttcctgttgtagattcttattattcattgttaatgcctatattaaccttgaccagggctttaactgcagagtcacatgttgacactgacttaacaaagccttacattaagtgggatttgttaaaatatgacttcacggaagagaggttaaaactctttgaccgttattttaaatattgggatcagacataccacccaaattgtgttaactgtttggatgacagatgcattctgcattgtgcaaactttaatgttttattctctacagtgttcccacctacaagttttggaccactagtgagaaaaatatttgttgatggtgttccatttgtagtttcaactggataccacttcagagagctaggtgttgtacataatcaggatgtaaacttacatagctctagacttagttttaaggaattacttgtgtatgctgctgaccctgctatgcacgctgcttctggtaatctattactagataaacgcactacgtgcttttcagtagctgcacttactaacaatgttgcttttcaaactgtcaaacccggtaattttaacaaagacttctatgactttgctgtgtctaagggtttctttaaggaaggaagttctgttgaattaaaacacttcttctttgctcaggatggtaatgctgctatcagcgattatgactactatcgttataatctaccaacaatgtgtgatatcagacaactactatttgtagttgaagttgttgataagtactttgattgttacgatggtggctgtattaatgctaaccaagtcatcgtcaacaacctagacaaatcagctggttttccatttaataaatggggtaaggctagactttattatgattcaatgagttatgaggatcaagatgcacttttcgcatatacaaaacgtaatgtcatccctactataactcaaatgaatcttaagtatgccattagtgcaaagaatagagctcgcaccgtagctggtgtctctatctgtagtactatgaccaatagacagtttcatcaaaaattattgaaatcaatagccgccactagaggagctactgtagtaattggaacaagcaaattctatggtggttggcacaacatgttaaaaactgtttatagtgatgtagaaaaccctcaccttatgggttgggattatcctaaatgtgatagagccatgcctaacatgcttagaattatggcctcacttgttcttgctcgcaaacatacaacgtgttgtagcttgtcacaccgtttctatagattagctaatgagtgtgctcaagtattgagtgaaatggtcatgtgtggcggttcactatatgttaaaccaggtggaacctcatcaggagatgccacaactgcttatgctaatagtgtttttaacatttgtcaagctgtcacggccaatgttaatgcacttttatctactgatggtaacaaaattgccgataagtatgtccgcaatttacaacacagactttatgagtgtctctatagaaatagagatgttgacacagactttgtgaatgagttttacgcatatttgcgtaaacatttctcaatgatgatactctctgacgatgctgttgtgtgtttcaatagcacttatgcatctcaaggtctagtggctagcataaagaactttaagtcagttctttattatcaaaacaatgtttttatgtctgaagcaaaatgttggactgagactgaccttactaaaggacctcatgaattttgctctcaacatacaatgctagttaaacagggtgatgattatgtgtaccttccttacccagatccatcaagaatcctaggggccggctgttttgtagatgatatcgtaaaaacagatggtacacttatgattgaacggttcgtgtctttagctatagatgcttacccacttactaaacatcctaatcaggagtatgctgatgtctttcatttgtacttacaatacataagaaagctacatgatgagttaacaggacacatgttagacatgtattctgttatgcttactaatgataacacttcaaggtattgggaacctgagttttatgaggctatgtacacaccgcatacagtcttacaggctgttggggcttgtgttctttgcaattcacagacttcattaagatgtggtgcttgcatacgtagaccattcttatgttgtaaatgctgttacgaccatgtcatatcaacatcacataaattagtcttgtctgttaatccgtatgtttgcaatgctccaggttgtgatgtcacagatgtgactcaactttacttaggaggtatgagctattattgtaaatcacataaaccacccattagttttccattgtgtgctaatggacaagtttttggtttatataaaaatacatgtgttggtagcgataatgttactgactttaatgcaattgcaacatgtgactggacaaatgctggtgattacattttagctaacacctgtactgaaagactcaagctttttgcagcagaaacgctcaaagctactgaggagacatttaaactgtcttatggtattgctactgtacgtgaagtgctgtctgacagagaattacatctttcatgggaagttggtaaacctagaccaccacttaaccgaaattatgtctttactggttatcgtgtaactaaaaacagtaaagtacaaataggagagtacacctttgaaaaaggtgactatggtgatgctgttgtttaccgaggtacaacaacttacaaattaaatgttggtgattattttgtgctgacatcacatacagtaatgccattaagtgcacctacactagtgccacaagagcactatgttagaattactggcttatacccaacactcaatatctcagatgagttttctagcaatgttgcaaattatcaaaaggttggtatgcaaaagtattctacactccagggaccacctggtactggtaagagtcattttgctattggcctagctctctactacccttctgctcgcatagtgtatacagcttgctctcatgccgctgttgatgcactatgtgagaaggcattaaaatatttgcctatagataaatgtagtagaattatacctgcacgtgctcgtgtagagtgttttgataaattcaaagtgaattcaacattagaacagtatgtcttttgtactgtaaatgcattgcctgagacgacagcagatatagttgtctttgatgaaatttcaatggccacaaattatgatttgagtgttgtcaatgccagattacgtgctaagcactatgtgtacattggcgaccctgctcaattacctgcaccacgcacattgctaactaagggcacactagaaccagaatatttcaattcagtgtgtagacttatgaaaactataggtccagacatgttcctcggaacttgtcggcgttgtcctgctgaaattgttgacactgtgagtgctttggtttatgataataagcttaaagcacataaagacaaatcagctcaatgctttaaaatgttttataagggtgttatcacgcatgatgtttcatctgcaattaacaggccacaaataggcgtggtaagagaattccttacacgtaaccctgcttggagaaaagctgtctttatttcaccttataattcacagaatgctgtagcctcaaagattttgggactaccaactcaaactgttgattcatcacagggctcagaatatgactatgtcatattcactcaaaccactgaaacagctcactcttgtaatgtaaacagatttaatgttgctattaccagagcaaaagtaggcatactttgcataatgtctgatagagacctttatgacaagttgcaatttacaagtcttgaaattccacgtaggaatgtggcaactttacaagctgaaaatgtaacaggactctttaaagattgtagtaaggtaatcactgggttacatcctacacaggcacctacacacctcagtgttgacactaaattcaaaactgaaggtttatgtgttgacatacctggcatacctaaggacatgacctatagaagactcatctctatgatgggttttaaaatgaattatcaagttaatggttaccctaacatgtttatcacccgcgaagaagctataagacatgtacgtgcatggattggcttcgatgtcgaggggtgtcatgctactagagaagctgttggtaccaatttacctttacagctaggtttttctacaggtgttaacctagttgctgtacctacaggttatgttgatacacctaataatacagatttttccagagttagtgctaaaccaccgcctggagatcaatttaaacacctcataccacttatgtacaaaggacttccttggaatgtagtgcgtataaagattgtacaaatgttaagtgacacacttaaaaatctctctgacagagtcgtatttgtcttatgggcacatggctttgagttgacatctatgaagtattttgtgaaaataggacctgagcgcacctgttgtctatgtgatagacgtgccacatgcttttccactgcttcagacacttatgcctgttggcatcattctattggatttgattacgtctataatccgtttatgattgatgttcaacaatggggttttacaggtaacctacaaagcaaccatgatctgtattgtcaagtccatggtaatgcacatgtagctagttgtgatgcaatcatgactaggtgtctagctgtccacgagtgctttgttaagcgtgttgactggactattgaatatcctataattggtgatgaactgaagattaatgcggcttgtagaaaggttcaacacatggttgttaaagctgcattattagcagacaaattcccagttcttcacgacattggtaaccctaaagctattaagtgtgtacctcaagctgatgtagaatggaagttctatgatgcacagccttgtagtgacaaagcttataaaatagaagaattattctattcttatgccacacattctgacaaattcacagatggtgtatgcctattttggaattgcaatgtcgatagatatcctgctaattccattgtttgtagatttgacactagagtgctatctaaccttaacttgcctggttgtgatggtggcagtttgtatgtaaataaacatgcattccacacaccagcttttgataaaagtgcttttgttaatttaaaacaattaccatttttctattactctgacagtccatgtgagtctcatggaaaacaagtagtgtcagatatagattatgtaccactaaagtctgctacgtgtataacacgttgcaatttaggtggtgctgtctgtagacatcatgctaatgagtacagattgtatctcgatgcttataacatgatgatctcagctggctttagcttgtgggtttacaaacaatttgatacttataacctctggaacacttttacaagacttcagagtttagaaaatgtggcttttaatgttgtaaataagggacactttgatggacaacagggtgaagtaccagtttctatcattaataacactgtttacacaaaagttgatggtgttgatgtagaattgtttgaaaataaaacaacattacctgttaatgtagcatttgagctttgggctaagcgcaacattaaaccagtaccagaggtgaaaatactcaataatttgggtgtggacattgctgctaatactgtgatctgggactacaaaagagatgctccagcacatatatctactattggtgtttgttctatgactgacatagccaagaaaccaactgaaacgatttgtgcaccactcactgtcttttttgatggtagagttgatggtcaagtagacttatttagaaatgcccgtaatggtgttcttattacagaaggtagtgttaaaggtttacaaccatctgtaggtcccaaacaagctagtcttaatggagtcacattaattggagaagccgtaaaaacacagttcaattattataagaaagttgatggtgttgtccaacaattacctgaaacttactttactcagagtagaaatttacaagaatttaaacccaggagtcaaatggaaattgatttcttagaattagctatggatgaattcattgaacggtataaattagaaggctatgccttcgaacatatcgtttatggagattttagtcatagtcagttaggtggtttacatctactgattggactagctaaacgttttaaggaatcaccttttgaattagaagattttattcctatggacagtacagttaaaaactatttcataacagatgcgcaaacaggttcatctaagtgtgtgtgttctgttattgatttattacttgatgattttgttgaaataataaaatcccaagatttatctgtagtttctaaggttgtcaaagtgactattgactatacagaaatttcatttatgctttggtgtaaagatggccatgtagaaacattttacccaaaattacaatctagtcaagcgtggcaaccgggtgttgctatgcctaatctttacaaaatgcaaagaatgctattagaaaagtgtgaccttcaaaattatggtgatagtgcaacattacctaaaggcataatgatgaatgtcgcaaaatatactcaactgtgtcaatatttaaacacattaacattagctgtaccctataatatgagagttatacattttggtgctggttctgataaaggagttgcaccaggtacagctgttttaagacagtggttgcctacgggtacgctgcttgtcgattcagatcttaatgactttgtctctgatgcagattcaactttgattggtgattgtgcaactgtacatacagctaataaatgggatctcattattagtgatatgtacgaccctaagactaaaaatgttacaaaagaaaatgactctaaagagggttttttcacttacatttgtgggtttatacaacaaaagctagctcttggaggttccgtggctataaagataacagaacattcttggaatgctgatctttataagctcatgggacacttcgcatggtggacagcctttgttactaatgtgaatgcgtcatcatctgaagcatttttaattggatgtaattatcttggcaaaccacgcgaacaaatagatggttatgtcatgcatgcaaattacatattttggaggaatacaaatccaattcagttgtcttcctattctttatttgacatgagtaaatttccccttaaattaaggggtactgctgttatgtctttaaaagaaggtcaaatcaatgatatgattttatctcttcttagtaaaggtagacttataattagagaaaacaacagagttgttatttctagtgatgttcttgttaacaactaaacgaacaatgtttgtttttcttgttttattgccactagtctctagtcagtgtgttaatcttacaaccagaactcaattaccccctgcatacactaattctttcacacgtggtgtttattaccctgacaaagttttcagatcctcagttttacattcaactcaggacttgttcttacctttcttttccaatgttacttggttccatgctatacatgtctctgggaccaatggtactaagaggtttgataaccctgtcctaccatttaatgatggtgtttattttgcttccactgagaagtctaacataataagaggctggatttttggtactactttagattcgaagacccagtccctacttattgttaataacgctactaatgttgttattaaagtctgtgaatttcaattttgtaatgatccatttttgggtgtttattaccacaaaaacaacaaaagttggatggaaagtgagttcagagtttattctagtgcgaataattgcacttttgaatatgtctctcagccttttcttatggaccttgaaggaaaacagggtaatttcaaaaatcttagggaatttgtgtttaagaatattgatggttattttaaaatatattctaagcacacgcctattaatttagtgcgtgatctcccccagggtttttcggctttagaaccattggtagatttgccaataggtattaacatcactaggtttcaaactttacttgctttacatagaagttatttgactcctggtgattcttcttcaggttggacagctggtgctgcagcttattatgtgggttatcttcaacctaggacttttctattaaaatataatgaaaatggaaccattacagatgctgtagactgtgcacttgaccctctctcagaaacaaagtgtacgttgaaatccttcactgtagaaaaaggaatctatcaaacttctaactttagagtccaaccaacagaatctattgttagatttcctaatattacaaacttgtgcccttttggtgaagtttttaacgccaccagatttgcatctgtttatgcttggaacaggaagagaatcagcaactgtgttgctgattattctgtcctatataattccgcatcattttccacttttaagtgttatggagtgtctcctactaaattaaatgatctctgctttactaatgtctatgcagattcatttgtaattagaggtgatgaagtcagacaaatcgctccagggcaaactggaaagattgctgattataattataaattaccagatgattttacaggctgcgttatagcttggaattctaacaatcttgattctaaggttggtggtaattataattacctgtatagattgtttaggaagtctaatctcaaaccttttgagagagatatttcaactgaaatctatcaggccggtagcacaccttgtaatggtgttgaaggttttaattgttactttcctttacaatcatatggtttccaacccactaatggtgttggttaccaaccatacagagtagtagtactttcttttgaacttctacatgcaccagcaactgtttgtggacctaaaaagtctactaatttggttaaaaacaaatgtgtcaatttcaacttcaatggtttaacaggcacaggtgttcttactgagtctaacaaaaagtttctgcctttccaacaatttggcagagacattgctgacactactgatgctgtccgtgatccacagacacttgagattcttgacattacaccatgttcttttggtggtgtcagtgttataacaccaggaacaaatacttctaaccaggttgctgttctttatcaggatgttaactgcacagaagtccctgttgctattcatgcagatcaacttactcctacttggcgtgtttattctacaggttctaatgtttttcaaacacgtgcaggctgtttaataggggctgaacatgtcaacaactcatatgagtgtgacatacccattggtgcaggtatatgcgctagttatcagactcagactaattctcctcggcgggcacgtagtgtagctagtcaatccatcattgcctacactatgtcacttggtgcagaaaattcagttgcttactctaataactctattgccatacccacaaattttactattagtgttaccacagaaattctaccagtgtctatgaccaagacatcagtagattgtacaatgtacatttgtggtgattcaactgaatgcagcaatcttttgttgcaatatggcagtttttgtacacaattaaaccgtgctttaactggaatagctgttgaacaagacaaaaacacccaagaagtttttgcacaagtcaaacaaatttacaaaacaccaccaattaaagattttggtggttttaatttttcacaaatattaccagatccatcaaaaccaagcaagaggtcatttattgaagatctacttttcaacaaagtgacacttgcagatgctggcttcatcaaacaatatggtgattgccttggtgatattgctgctagagacctcatttgtgcacaaaagtttaacggccttactgttttgccacctttgctcacagatgaaatgattgctcaatacacttctgcactgttagcgggtacaatcacttctggttggacctttggtgcaggtgctgcattacaaataccatttgctatgcaaatggcttataggtttaatggtattggagttacacagaatgttctctatgagaaccaaaaattgattgccaaccaatttaatagtgctattggcaaaattcaagactcactttcttccacagcaagtgcacttggaaaacttcaagatgtggtcaaccaaaatgcacaagctttaaacacgcttgttaaacaacttagctccaattttggtgcaatttcaagtgttttaaatgatatcctttcacgtcttgacaaagttgaggctgaagtgcaaattgataggttgatcacaggcagacttcaaagtttgcagacatatgtgactcaacaattaattagagctgcagaaatcagagcttctgctaatcttgctgctactaaaatgtcagagtgtgtacttggacaatcaaaaagagttgatttttgtggaaagggctatcatcttatgtccttccctcagtcagcacctcatggtgtagtcttcttgcatgtgacttatgtccctgcacaagaaaagaacttcacaactgctcctgccatttgtcatgatggaaaagcacactttcctcgtgaaggtgtctttgtttcaaatggcacacactggtttgtaacacaaaggaatttttatgaaccacaaatcattactacagacaacacatttgtgtctggtaactgtgatgttgtaataggaattgtcaacaacacagtttatgatcctttgcaacctgaattagactcattcaaggaggagttagataaatattttaagaatcatacatcaccagatgttgatttaggtgacatctctggcattaatgcttcagttgtaaacattcaaaaagaaattgaccgcctcaatgaggttgccaagaatttaaatgaatctctcatcgatctccaagaacttggaaagtatgagcagtatataaaatggccatggtacatttggctaggttttatagctggcttgattgccatagtaatggtgacaattatgctttgctgtatgaccagttgctgtagttgtctcaagggctgttgttcttgtggatcctgctgcaaatttgatgaagacgactctgagccagtgctcaaaggagtcaaattacattacacataaacgaacttatggatttgtttatgagaatcttcacaattggaactgtaactttgaagcaaggtgaaatcaaggatgctactccttcagattttgttcgcgctactgcaacgataccgatacaagcctcactccctttcggatggcttattgttggcgttgcacttcttgctgtttttcagagcgcttccaaaatcataaccctcaaaaagagatggcaactagcactctccaagggtgttcactttgtttgcaacttgctgttgttgtttgtaacagtttactcacaccttttgctcgttgctgctggccttgaagccccttttctctatctttatgctttagtctacttcttgcagagtataaactttgtaagaataataatgaggctttggctttgctggaaatgccgttccaaaaacccattactttatgatgccaactattttctttgctggcatactaattgttacgactattgtataccttacaatagtgtaacttcttcaattgtcattacttcaggtgatggcacaacaagtcctatttctgaacatgactaccagattggtggttatactgaaaaatgggaatctggagtaaaagactgtgttgtattacacagttacttcacttcagactattaccagctgtactcaactcaattgagtacagacactggtgttgaacatgttaccttcttcatctacaataaaattgttgatgagcctgaagaacatgtccaaattcacacaatcgacggttcatccggagttgttaatccagtaatggaaccaatttatgatgaaccgacgacgactactagcgtgcctttgtaagcacaagctgatgagtacgaacttatgtactcattcgtttcggaagagacaggtacgttaatagttaatagcgtacttctttttcttgctttcgtggtattcttgctagttacactagccatccttactgcgcttcgattgtgtgcgtactgctgcaatattgttaacgtgagtcttgtaaaaccttctttttacgtttactctcgtgttaaaaatctgaattcttctagagttcctgatcttctggtctaaacgaactaaatattatattagtttttctgtttggaactttaattttagccatggcagattccaacggtactattaccgttgaagagcttaaaaagctccttgaacaatggaacctagtaataggtttcctattccttacatggatttgtcttctacaatttgcctatgccaacaggaataggtttttgtatataattaagttaattttcctctggctgttatggccagtaactttagcttgttttgtgcttgctgctgtttacagaataaattggatcaccggtggaattgctatcgcaatggcttgtcttgtaggcttgatgtggctcagctacttcattgcttctttcagactgtttgcgcgtacgcgatccatgtggtcattcaatccagaaactaacattcttctcaacgtgccactccatggcactattctgaccagaccgcttctagaaagtgaactcgtaatcggagctgtgatccttcgtggacatcttcgtattgctggacaccatctaggacgctgtgacatcaaggacctgcctaaagaaatcactgttgctacatcacgaacgctttcttattacaaattgggagcttcgcagcgtgtagcaggtgactcaggttttgctgcatacagtcgctacaggattggcaactataaattaaacacagaccattccagtagcagtgacaatattgctttgcttgtacagtaagtgacaacagatgtttcatctcgttgactttcaggttactatagcagagatattactaattattatgaggacttttaaagtttccatttggaatcttgattacatcataaacctcataattaaaaatttatctaagtcactaactgagaataaatattctcaattagatgaagagcaaccaatggagattgattaaacgaacatgaaaattattcttttcttggcactgataacactcgctacttgtgagctttatcactaccaagagtgtgttagaggtacaacagtacttttaaaagaaccttgctcttctggaacatacgagggcaattcaccatttcatcctctagctgataacaaatttgcactgacttgctttagcactcaatttgcttttgcttgtcctgacggcgtaaaacacgtctatcagttacgtgccagatcagtttcacctaaactgttcatcagacaagaggaagttcaagaactttactctccaatttttcttattgttgcggcaatagtgtttataacactttgcttcacactcaaaagaaagacagaatgattgaactttcattaattgacttctatttgtgctttttagcctttctgctattccttgttttaattatgcttattatcttttggttctcacttgaactgcaagatcataatgaaacttgtcacgcctaaacgaacatgaaatttcttgttttcttaggaatcatcacaactgtagctgcatttcaccaagaatgtagtttacagtcatgtactcaacatcaaccatatgtagttgatgacccgtgtcctattcacttctattctaaatggtatattagagtaggagctagaaaatcagcacctttaattgaattgtgcgtggatgaggctggttctaaatcacccattcagtacatcgatatcggtaattatacagtttcctgtttaccttttacaattaattgccaggaacctaaattgggtagtcttgtagtgcgttgttcgttctatgaagactttttagagtatcatgacgttcgtgttgttttagatttcatctaaacgaacaaactaaaatgtctgataatggaccccaaaatcagcgaaatgcaccccgcattacgtttggtggaccctcagattcaactggcagtaaccagaatggagaacgcagtggggcgcgatcaaaacaacgtcggccccaaggtttacccaataatactgcgtcttggttcaccgctctcactcaacatggcaaggaagaccttaaattccctcgaggacaaggcgttccaattaacaccaatagcagtccagatgaccaaattggctactaccgaagagctaccagacgaattcgtggtggtgacggtaaaatgaaagatctcagtccaagatggtatttctactacctaggaactgggccagaagctggacttccctatggtgctaacaaagacggcatcatatgggttgcaactgagggagccttgaatacaccaaaagatcacattggcacccgcaatcctgctaacaatgctgcaatcgtgctacaacttcctcaaggaacaacattgccaaaaggcttctacgcagaagggagcagaggcggcagtcaagcctcttctcgttcctcatcacgtagtcgcaacagttcaagaaattcaactccaggcagcagtaggggaacttctcctgctagaatggctggcaatggcggtgatgctgctcttgctttgctgctgcttgacagattgaaccagcttgagagcaaaatgtctggtaaaggccaacaacaacaaggccaaactgtcactaagaaatctgctgctgaggcttctaagaagcctcggcaaaaacgtactgccactaaagcatacaatgtaacacaagctttcggcagacgtggtccagaacaaacccaaggaaattttggggaccaggaactaatcagacaaggaactgattacaaacattggccgcaaattgcacaatttgcccccagcgcttcagcgttcttcggaatgtcgcgcattggcatggaagtcacaccttcgggaacgtggttgacctacacaggtgccatcaaattggatgacaaagatccaaatttcaaagatcaagtcattttgctgaataagcatattgacgcatacaaaacattcccaccaacagagcctaaaaaggacaaaaagaagaaggctgatgaaactcaagccttaccgcagagacagaagaaacagcaaactgtgactcttcttcctgctgcagatttggatgatttctccaaacaattgcaacaatccatgagcagtgctgactcaactcaggcctaaactcatgcagaccacacaaggcagatgggctatataaacgttttcgcttttccgtttacgatatatagtctactcttgtgcagaatgaattctcgtaactacatagcacaagtagatgtagttaactttaatctcacatagcaatctttaatcagtgtgtaacattagggaggacttgaaagagccaccacattttcaccgaggccacgcggagtacgatcgagtgtacagtgaacaatgctagggagagctgcctatatggaagagccctaatgtgtaaaattaattttagtagtgctatccccatgtgattttaatagcttcttaggagaatgacaaaaaaaaaaaaaaaaaaaaaaaaaaaaaaaaaaaaaaaaaaaaaaaaaaaaaaaaaaagggtcggcatggcatctccacctcctcgcggtccgacctgggcatccgaaggaggacgcacgtccactcggatggctaagggagcagcacactggcggccgttactagggccgcgcccttcccaacagttgcgcagcctgaatggcgaatggagatccaatttttaagtgtataatgtgttaaactactgattctaattgtttgtgtattttagattcacagtcccaaggctcatttcaggcccctcagtcctcacagtctgttcatgatcataatcagccataccacatttgtagaggttttacttgctttaaaaaacctcccacacctccccctgaacctgaaacataaaatgaatgcaattgttgttgttaacttgtttattgcagcttataatggttacaaataaagcaatagcatcacaaatttcacaaataaagcatttttttcactgcattctagttgtggtttgtccaaactcatcaatgtatcttaaagcttgagtattctatagtctcacctaaatagcttggcgtaatcatggtcatagctgtttcctgtgtgaaattgttatccgctcacaattccacacaacatacgagccggaagcataaagtgtaaagcctggggtgcctaatgagtgagctaactcacattaattgcgttgcgctcactgcccgctttccagtcgggaaacctgtcgtgccagctgcattaatgaatcggccaacgcgaaccccttgcggccgcccgggccgtcgaccaattctcatgtttgacagcttatcatcgaatttctgccattcatccgcttattatcacttattcaggcgtagcaaccaggcgtttaagggcaccaataactgccttaaaaaaattacgccccgccctgccactcatcgcagtactgttgtaattcattaagcattctgccgacatggaagccatcacaaacggcatgatgaacctgaatcgccagcggcatcagcaccttgtcgccttgcgtataatatttgcccatggtgaaaacgggggcgaagaagttgtccatattggccacgtttaaatcaaaactggtgaaactcacccagggattggctgagacgaaaaacatattctcaataaaccctttagggaaataggccaggttttcaccgtaacacgccacatcttgcgaatatatgtgtagaaactgccggaaatcgtcgtggtattcactccagagcgatgaaaacgtttcagtttgctcatggaaaacggtgtaacaagggtgaacactatcccatatcaccagctcaccgtctttcattgccatacgaaattccggatgagcattcatcaggcgggcaagaatgtgaataaaggccggataaaacttgtgcttatttttctttacggtctttaaaaaggccgtaatatccagctgaacggtctggttataggtacattgagcaactgactgaaatgcctcaaaatgttctttacgatgccattgggatatatcaacggtggtatatccagtgatttttttctccattttagcttccttagctcctgaaaatctcgataactcaaaaaatacgcccggtagtgatcttatttcattatggtgaaagttggaacctcttacgtgccgatcaacgtctcattttcgccaaaagttggcccagggcttcccggtatcaacagggacaccaggatttatttattctgcgaagtgatcttccgtcacaggtatttattcgcgataagctcatggagcggcgtaaccgtcgcacaggaaggacagagaaagcgcggatctgggaagtgacggacagaacggtcaggacctggattggggaggcggttgccgccgctgctgctgacggtgtgacgttctctgttccggtcacaccacatacgttccgccattcctatgcgatgcacatgctgtatgccggtataccgctgaaagttctgcaaagcctgatgggacataagtccatcagttcaacggaagtctacacgaaggtttttgcgctggatgtggctgcccggcaccgggtgcagtttgcgatgccggagtctgatgcggttgcgatgctgaaacaattatcctgagaataaatgccttggcctttatatggaaatgtggaactgagtggatatgctgtttttgtctgttaaacagagaagctggctgttatccactgagaagcgaacgaaacagtcgggaaaatctcccattatcgtagagatccgcattattaatctcaggagcctgtgtagcgtttataggaagtagtgttctgtcatgatgcctgcaagcggtaacgaaaacgatttgaatatgccttcaggaacaatagaaatcttcgtgcggtgttacgttgaagtggagcggattatgtcagcaatggacagaacaacctaatgaacacagaaccatgatgtggtctgtccttttacagccagtagtgctcgccgcagtcgagcgacagggcgaagccctcggctggttgccctcgccgctgggctggcggccgtctatggccctgcaaacgcgccagaaacgccgtcgaagccgtgtgcgagacaccgcggccggccgccggcgttgtggatacctcgcggaaaacttggccctcactgacagatgaggggcggacgttgacacttgaggggccgactcacccggcgcggcgttgacagatgaggggcaggctcgatttcggccggcgacgtggagctggccagcctcgcaaatcggcgaaaacgcctgattttacgcgagtttcccacagatgatgtggacaagcctggggataagtgccctgcggtattgacacttgaggggcgcgactactgacagatgaggggcgcgatccttgacacttgaggggcagagtgctgacagatgaggggcgcacctattgacatttgaggggctgtccacaggcagaaaatccagcatttgcaagggtttccgcccgtttttcggccaccgctaacctgtcttttaacctgcttttaaaccaatatttataaaccttgtttttaaccagggctgcgccctgtgcgcgtgaccgcgcacgccgaaggggggtgcccccccttctcgaaccctcccggtcgagtgagcgaggaagcaccagggaacagcacttatatattctgcttacacacgatgcctgaaaaaacttcccttggggttatccacttatccacggggatatttttataattattttttttatagtttttagatcttcttttttagagcgccttgtaggcctttatccatgctggttctagagaaggtgttgtgacaaattgccctttcagtgtgacaaatcaccctcaaatgacagtcctgtctgtgacaaattgcccttaaccctgtgacaaattgccctcagaagaagctgttttttcacaaagttatccctgcttattgactcttttttatttagtgtgacaatctaaaaacttgtcacacttcacatggatctgtcatggcggaaacagcggttatcaatcacaagaaacgtaaaaatagcccgcgaatcgtccagtcaaacgacctcactgaggcggcatatagtctctcccgggatcaaaaacgtatgctgtatctgttcgttgaccagatcagaaaatctgatggcaccctacaggaacatgacggtatctgcgagatccatgttgctaaatatgctgaaatattcggattgacctctgcggaagccagtaaggatatacggcaggcattgaagagtttcgcggggaaggaagtggttttttatcgccctgaagaggatgccggcgatgaaaaaggctatgaatcttttccttggtttatcaaacgtgcgcacagtccatccagagggctttacagtgtacatatcaacccatatctcattcccttctttatcgggttacagaaccggtttacgcagtttcggcttagtgaaacaaaagaaatcaccaatccgtatgccatgcgtttatacgaatccctgtgtcagtatcgtaagccggatggctcaggcatcgtctctctgaaaatcgactggatcatagagcgttaccagctgcctcaaagttaccagcgtatgcctgacttccgccgccgcttcctgcaggtctgtgttaatgagatcaacagcagaactccaatgcgcctctcatacattgagaaaaagaaaggccgccagacgactcatatcgtattttccttccgcgatatcacttccatgacgacaggatagtctgagggttatctgtcacagatttgagggtggttcgtcacatttgttctgacctactgagggtaatttgtcacagttttgctgtttccttcagcctgcatggattttctcatactttttgaactgtaatttttaaggaagccaaatttgagggcagtttgtcacagttgatttccttctctttcccttcgtcatgtgacctgatatcgggggttagttcgtcatcattgatgagggttgattatcacagtttattactctgaattggctatccgcgtgtgtacctctacctggagtttttcccacggtggatatttcttcttgcgctgagcgtaagagctatctgacagaacagttcttctttgcttcctcgccagttcgctcgctatgctcggttacacggctgcggcg

SEQ ID NO: 28 - DNA, 35283 bp, Artificial Sequence
  Clone pCCI-4K-SARS-CoV-2-WWWDD. Based on SARS-CoV-2.
gatgtgctgcaaggcgattaagttgggtaacgccagggttttcccagtcacgacgttgtaaaacgacggccagtgaattgtaatacgactcactatagggcgaattctagttattaatagtaatcaattacggggtcattagttcatagcccatatatggagttccgcgttacataacttacggtaaatggcccgcctggctgaccgcccaacgacccccgcccattgacgtcaataatgacgtatgttcccatagtaacgccaatagggactttccattgacgtcaatgggtggagtatttacggtaaactgcccacttggcagtacatcaagtgtatcatatgccaagtacgccccctattgacgtcaatgacggtaaatggcccgcctggcattatgcccagtacatgaccttatgggactttcctacttggcagtacatctacgtattagtcatcgctattaccatggtgatgcggttttggcagtacatcaatgggcgtggatagcggtttgactcacggggatttccaagtctccaccccattgacgtcaatgggagtttgttttggcaccaaaatcaacgggactttccaaaatgtcgtaacaactccgccccattgacgcaaatgggcggtaggcgtgtacggtgggaggtctatataagcagagctggtttagtgaaccgtattaaaggtttataccttcccaggtaacaaaccaaccaactttcgatctcttgtagatctgttctctaaacgaactttaaaatctgtgtggctgtcactcggctgcatgcttagtgcactcacgcagtataattaataactaattactgtcgttgacaggacacgagtaactcgtctatcttctgcaggctgcttacggtttcgtccgtgttgcagccgatcatcagcacatctaggtttcgtccgggtgtgaccgaaaggtaagatggagagccttgtccctggtttcaacgagaaaacacacgtccaactcagtttgcctgttttacaggttcgcgacgtgctcgtacgtggctttggagactccgtggaggaggtcttatcagaggcacgtcaacatcttaaagatggcacttgtggcttagtagaagttgaaaaaggcgttttgcctcaacttgaacagccctatgtgttcatcaaacgttcggatgctcgaactgcacctcatggtcatgttatggttgagctggtagcagaactcgaaggcattcagtacggtcgtagtggtgagacacttggtgtccttgtccctcatgtgggcgaaataccagtggcttaccgcaaggttcttcttcgtaagaacggtaataaaggagctggtggccatagttacggcgccgatctaaagtcatttgacttaggcgacgagcttggcactgatccttatgaagattttcaagaaaactggaacactaaacatagcagtggtgttacccgtgaactcatgcgtgagcttaacggaggggcatacactcgctatgtcgataacaacttctgtggccctgatggctaccctcttgagtgcattaaagaccttctagcacgtgctggtaaagcttcatgcactttgtccgaacaactggactttattgacactaagaggggtgtatactgctgccgtgaacatgagcatgaaattgcttggtacacggaacgttctgaaaagagctatgaattgcagacaccttttgaaattaaattggcaaagaaatttgacaccttcaatggggaatgtccaaattttgtatttcccttaaattccataatcaagactattcaaccaagggttgaaaagaaaaagcttgatggctttatgggtagaattcgatctgtctatccagttgcgtcaccaaatgaatgcaaccaaatgtgcctttcaactctcatgaagtgtgatcattgtggtgaaacttcatggcagacgggcgattttgttaaagccacttgcgaattttgtggcactgagaatttgactaaagaaggtgccactacttgtggttacttaccccaaaatgctgttgttaaaatttattgtccagcatgtcacaattcagaagtaggacctgagcatagtcttgccgaataccataatgaatctggcttgaaaaccattcttcgtaagggtggtcgcactattgcctttggaggctgtgtgttctcttatgttggttgccataacaagtgtgcctattgggtcccacgtgctagcgctaacataggttgtaaccatacaggtgttgttggagaaggttccgaaggtcttaatgacaaccttcttgaaatactccaaaaagagaaagtcaacatcaatattgttggtgactttaaacttaatgaagagatcgccattattttggcatctttttctgcttccacaagtgcttttgtggaaactgtgaaaggtttggattataaagcattcaaacaaattgttgaatcctgtggtaattttaaagttacaaaaggaaaagctaaaaaaggtgcctggaatattggtgaacagaaatcaatactgagtcctctttatgcatttgcatcagaggctgctcgtgttgtacgatcaattttctcccgcactcttgaaactgctcaaaattctgtgcgtgttttacagaaggccgctataacaatactagatggaatttcacagtattcactgagactcattgatgctatgatgttcacatctgatttggctactaacaatctagttgtaatggcctacattacaggtggtgttgttcagttgacttcgcagtggctaactaacatctttggcactgtttatgaaaaactcaaacccgtccttgattggcttgaagagaagtttaaggaaggtgtagagtttcttagagacggttgggaaattgttaaatttatctcaacctgtgcttgtgaaattgtcggtggacaaattgtcacctgtgcaaaggaaattaaggagagtgttcagacattctttaagcttgtaaataaatttttggctttgtgtgctgactctatcattattggtggagctaaacttaaagccttgaatttaggtgaaacatttgtcacgcactcaaagggattgtacagaaagtgtgttaaatccagagaagaaactggcctactcatgcctctaaaagccccaaaagaaattatcttcttagagggagaaacacttcccacagaagtgttaacagaggaagttgtcttgaaaactggtgatttacaaccattagaacaacctactagtgaagctgttgaagctccattggttggtacaccagtttgtattaacgggcttatgttgctcgaaatcaaagacacagaaaagtactgtgcccttgcacctaatatgatggtaacaaacaataccttcacactcaaaggcggtgcaccaacaaaggttacttttggtgatgacactgtgatagaagtgcaaggttacaagagtgtgaatatcacttttgaacttgatgaaaggattgataaagtacttaatgagaagtgctctgcctatacagttgaactcggtacagaagtaaatgagttcgcctgtgttgtggcagatgctgtcataaaaactttgcaaccagtatctgaattacttacaccactgggcattgatttagatgagtggagtatggctacatactacttatttgatgagtctggtgagtttaaattggcttcacatatgtattgttctttctaccctccagatgaggatgaagaagaaggtgattgtgaagaagaagagtttgagccatcaactcaatatgagtatggtactgaagatgattaccaaggtaaacctttggaatttggtgccacttctgctgctcttcaacctgaagaagagcaagaagaagattggttagatgatgatagtcaacaaactgttggtcaacaagacggcagtgaggacaatcagacaactactattcaaacaattgttgaggttcaacctcaattagagatggaacttacaccagttgttcagactattgaagtgaatagttttagtggttatttaaaacttactgacaatgtatacattaaaaatgcagacattgtggaagaagctaaaaaggtaaaaccaacagtggttgttaatgcagccaatgtttaccttaaacatggaggaggtgttgcaggagccttaaataaggctactaacaatgccatgcaagttgaatctgatgattacatagctactaatggaccacttaaagtgggtggtagttgtgttttaagcggacacaatcttgctaaacactgtcttcatgttgtcggcccaaatgttaacaaaggtgaagacattcaacttcttaagagtgcttatgaaaattttaatcagcacgaagttctacttgcaccattattatcagctggtatttttggtgctgaccctatacattctttaagagtttgtgtagatactgttcgcacaaatgtctacttagctgtctttgataaaaatctctatgacaaacttgtttcaagctttttggaaatgaagagtgaaaagcaagttgaacaaaagatcgctgagattcctaaagaggaagttaagccatttataactgaaagtaaaccttcagttgaacagagaaaacaagatgataagaaaatcaaagcttgtgttgaagaagttacaacaactctggaagaaactaagttcctcacagaaaacttgttactttatattgacattaatggcaatcttcatccagattctgccactcttgttagtgacattgacatcactttcttaaagaaagatgctccatatatagtgggtgatgttgttcaagagggtgttttaactgctgtggttatacctactaaaaaggctggtggcactactgaaatgctagcgaaagctttgagaaaagtgccaacagacaattatataaccacttacccgggtcagggtttaaatggttacactgtagaggaggcaaagacagtgcttaaaaagtgtaaaagtgccttttacattctaccatctattatctctaatgagaagcaagaaattcttggaactgtttcttggaatttgcgagaaatgcttgcacatgcagaagaaacacgcaaattaatgcctgtctgtgtggaaactaaagccatagtttcaactatacagcgtaaatataagggtattaaaatacaagagggtgtggttgattatggtgctagattttacttttacaccagtaaaacaactgtagcgtcacttatcaacacacttaacgatctaaatgaaactcttgttacaatgccacttggctatgtaacacatggcttaaatttggaagaagctgctcggtatatgagatctctcaaagtgccagctacagtttctgtttcttcacctgatgctgttacagcgtataatggttatcttacttcttcttctaaaacacctgaagaacattttattgaaaccatctcacttgctggttcctataaagattggtcctattctggacaatctacacaactaggtatagaatttcttaagagaggtgataaaagtgtatattacactagtaatcctaccacattccacctagatggtgaagttatcacctttgacaatcttaagacacttctttctttgagagaagtgaggactattaaggtgtttacaacagtagacaacattaacctccacacgcaagttgtggacatgtcaatgacatatggacaacagtttggtccaacttatttggatggagctgatgttactaaaataaaacctcataattcacatgaaggtaaaacattttatgttttacctaatgatgacactctacgtgttgaggcttttgagtactaccacacaactgatcctagttttctgggtaggtacatgtcagcattaaatcacactaaaaagtggaaatacccacaagttaatggtttaacttctattaaatgggcagataacaactgttatcttgccactgcattgttaacactccaacaaatagagttgaagtttaatccacctgctctacaagatgcttattacagagcaagggctggtgaagctgctaacttttgtgcacttatcttagcctactgtaataagacagtaggtgagttaggtgatgttagagaaacaatgagttacttgtttcaacatgccaatttagattcttgcaaaagagtcttgaacgtggtgtgtaaaacttgtggacaacagcagacaacccttaagggtgtagaagctgttatgtacatgggcacactttcttatgaacaatttaagaaaggtgttcagataccttgtacgtgtggtaaacaagctacaaaatatctagtacaacaggagtcaccttttgttatgatgtcagcaccacctgctcagtatgaacttaagcatggtacatttacttgtgctagtgagtacactggtaattaccagtgtggtcactataaacatataacttctaaagaaactttgtattgcatagacggtgctttacttacaaagtcctcagaatacaaaggtcctattacggatgttttctacaaagaaaacagttacacaacaaccataaaaccagttacttataaattggatggtgttgtttgtacagaaattgaccctaagttggacaattattataagaaagacaattcttatttcacagagcaaccaattgatcttgtaccaaaccaaccatatccaaacgcaagcttcgataattttaagtttgtatgtgataatatcaaatttgctgatgatttaaaccagttaactggttataagaaacctgcttcaagagagcttaaagttacatttttccctgacttaaatggtgatgtggtggctattgattataaacactacacaccctcttttaagaaaggagctaaattgttacataaacctattgtttggcatgttaacaatgcaactaataaagccacgtataaaccaaatacctggtgtatacgttgtctttggagcacaaaaccagttgaaacatcaaattcgtttgatgtactgaagtcagaggacgcgcagggaatggataatcttgcctgcgaagatctaaaaccagtctctgaagaagtagtggaaaatcctaccatacagaaagacgttcttgagtgtaatgtgaaaactaccgaagttgtaggagacattatacttaaaccagcaaataatagtttaaaaattacagaagaggttggccacacagatctaatggctgcttatgtagacaattctagtcttactattaagaaacctaatgaattatctagagtattaggtttgaaaacccttgctactcatggtttagctgctgttaatagtgtcccttgggatactatagctaattatgctaagccttttcttaacaaagttgttagtacaactactaacatagttacacggtgtttaaaccgtgtttgtactaattatatgccttatttctttactttattgctacaattgtgtacttttactagaagtacaaattctagaattaaagcatctatgccgactactatagcaaagaatactgttaagagtgtcggtaaattttgtctagaggcttcatttaattatttgaagtcacctaatttttctaaactgataaatattataatttggtttttactattaagtgtttgcctaggttctttaatctactcaaccgctgctttaggtgttttaatgtctaatttaggcatgccttcttactgtactggttacagagaaggctatttgaactctactaatgtcactattgcaacctactgtactggttctataccttgtagtgtttgtcttagtggtttagattctttagacacctatccttctttagaaactatacaaattaccatttcatcttttaaatgggatttaactgcttttggcttagttgcagagtggtttttggcatatattcttttcactaggtttttctatgtacttggattggctgcaatcatgcaattgtttttcagctattttgcagtacattttattagtaattcttggcttatgtggttaataattaatcttgtacaaatggccccgatttcagctatggttagaatgtacatcttctttgcatcattttattatgtatggaaaagttatgtgcatgttgtagacggttgtaattcatcaacttgtatgatgtgttacaaacgtaatagagcaacaagagtcgaatgtacaactattgttaatggtgttagaaggtccttttatgtctatgctaatggaggtaaaggcttttgcaaactacacaattggaattgtgttaattgtgatacattctgtgctggtagtacatttattagtgatgaagttgcgagagacttgtcactacagtttaaaagaccaataaatcctactgaccagtcttcttacatcgttgatagtgttacagtgaagaatggttccatccatctttactttgataaagctggtcaaaagacttatgaaagacattctctctctcattttgttaacttagacaacctgagagctaataacactaaaggttcattgcctattaatgttatagtttttgatggtaaatcaaaatgtgaagaatcatctgcaaaatcagcgtctgtttactacagtcagcttatgtgtcaacctatactgttactagatcaggcattagtgtctgatgttggtgatagtgcggaagttgcagttaaaatgtttgatgcttacgttaatacgttttcatcaacttttaacgtaccaatggaaaaactcaaaacactagttgcaactgcagaagctgaacttgcaaagaatgtgtccttagacaatgtcttatctacttttatttcagcagctcggcaagggtttgttgattcagatgtagaaactaaagatgttgttgaatgtcttaaattgtcacatcaatctgacatagaagttactggcgatagttgtaataactatatgctcacctataacaaagttgaaaacatgacaccccgtgaccttggtgcttgtattgactgtagtgcgcgtcatattaatgcgcaggtagcaaaaagtcacaacattgctttgatatggaacgttaaagatttcatgtcattgtctgaacaactacgaaaacaaatacgtagtgctgctaaaaagaataacttaccttttaagttgacatgtgcaactactagacaagttgttaatgttgtaacaacaaagatagcacttaagggtggtaaaattgttaataattggttgaagcagttaattaaagtaacgctagtatttctatttgtagcggcgatattttatttaataacgccggtacatgtaatgtcgaaacatacggatttttcgtcggaaataataggttataaagcgatagatggtggtgtaactcgtgatatagcgtcgacggatacgtgttttgcgaataaacatgcggattttgatacgtggttttcgcaacgtggtggttcgtatacgaatgataaagcgtgtccgttaatagcggcggtaataacacgtgaagtaggttttgtagtaccgggtttaccgggtacgatattacgtacgacgaatggtgattttttacattttttaccgcgtgtattttcggcggtaggtaatatatgttatacgccgtcgaaactaatagaatatacggattttgcgacgtcggcgtgtgtattagcggcggaatgtacgatatttaaagatgcgtcgggtaaaccggtaccgtattgttatgatacgaatgtactagaaggttcggtagcgtatgaatcgttacgcccggatacacgttatgtactaatggatggttcgataatacaatttccgaatacgtatctagaaggttcggtacgtgtagtaacgacgtttgattcggaatattgtcgtcatggtacgtgtgaacgttcggaagcgggtgtatgtgtatcgacgtcggggcgttgggtactaaataatgattattatcgttcgttaccgggtgtattctgtggtgtagatgcggtaaatttactaacgaatatgtttacgccgctgatacaaccgataggtgcgttagatatatcggcgtcgatagtagcgggtggtatagtagcgatagtagtaacgtgtctagcgtattattttatgcgttttcgtcgtgcgtttggtgaatattcgcatgtagtagcgtttaatacgttactatttctaatgtcttttacagtactatgtttaacgccggtatattcttttttaccgggtgtatattcggtaatatatttatatttaacgttttatctaacgaatgatgtatcgtttttagcgcatatacaatggatggtaatgtttacgccgttagtaccgttttggataacaatagcgtatataatatgtatatcgacgaaacatttttattggtttttttcgaattatctgaaacgtcgtgtagtatttaatggtgtatctttttcgacgtttgaagaagcggcgctatgtacatttttattaaataaagaaatgtatctaaaattacgttcggatgtactattaccgctaacgcaatataatcgttatttagcgctatataataaatataaatatttttcgggtgcgatggatacgacgtcgtatcgtgaagcggcgtgttgtcatctagcgaaagcgctaaatgatttttcgaattcgggttcggatgtactatatcaaccgccgcaaacgtcgataacgtcggcggtattacaatcgggttttcgtaaaatggcgtttccgtcgggtaaagtagaaggttgtatggtacaagtaacgtgtggtacgacgacgctaaatggtctatggctagatgatgtagtatattgtccgcgtcatgtaatatgtacgtcggaagatatgctaaatccgaattatgaagatttactaatacgtaaatcgaatcataattttttagtacaagcgggtaatgtacaactacgtgtaataggtcattcgatgcaaaattgtgtactaaaactaaaagtagatacggcgaatccgaaaacaccgaaatataaatttgtacgtatacaaccgggtcaaacgttttcggtattagcgtgttataatggttctccgtcgggtgtatatcaatgtgcgatgcgtccgaattttacgattaaaggttcgtttctaaatggttcgtgtggttcggtaggttttaatatagattatgattgtgtatcgttttgttatatgcatcatatggaattaccgacgggtgtacatgcgggtacggatttagaaggtaatttttatggtccgtttgtagatcgtcaaacagcgcaagcggcgggtacggatacgacgattacggtaaatgtattagcgtggttatatgcggcggtaataaatggtgatcgttggtttctaaatcgttttacgacgacgctaaatgattttaatctagtagcgatgaaatataattatgaaccgctgacacaagatcatgtagatatactaggtccgctatcggcgcaaacgggtatagcggtattagatatgtgtgcgtcgttaaaagaattactacaaaatggtatgaatggtcgtacgatattaggttcggcgttattagaagatgaatttacgccgtttgatgtagtacgtcaatgttcgggtgtaacgtttcaatcggcggtaaaacgtacgataaaaggtacgcatcattggttattactaacgatattaacgtcgctattagtattagtacaatcgacgcaatggtcgttatttttttttttatatgaaaatgcgtttttaccgtttgcgatgggtataatagcgatgtcggcgtttgcgatgatgtttgtaaaacataagcatgcgtttctatgtttatttttattaccgtcgctagcgacggtagcgtattttaatatggtatatatgccggcgtcgtgggtaatgcgtataatgacgtggttagatatggtagatacgtcgttatcgggttttaaactaaaagattgtgtaatgtatgcgtcggcggtagtattactaatactaatgacggcgcgtacggtatatgatgatggtgcgcgtcgtgtatggacgctaatgaatgtattaacgctagtatataaagtatattatgggaatgcgttagatcaagcgatatcgatgtgggcgctaataatatcggtaacgtcgaattattcgggtgtagtaacgacggtaatgtttttagcgcgtggtatagtatttatgtgtgtagaatattgtccgatattttttataacgggtaatacactacaatgtataatgctagtatattgttttttaggttatttttgtacgtgttattttggtctattttgtttactaaatcgttattttcgtctaacactaggtgtatatgattatttagtatcgacgcaagaatttcgttatatgaattcgcaaggtctactaccgccgaaaaattcgatagatgcgtttaaactaaatataaaattattaggtgtaggtggtaaaccgtgtataaaagtagcgacggtacaatcgaaaatgtcggatgtaaaatgtacatcggtagtattactatcggtattacaacaactacgtgtagaatcgtcgtcgaaattatgggcgcaatgtgtacaattacataatgatatactattagcgaaagatacgacggaagcgtttgaaaaaatggtatcgctactatcggtattactatcgatgcaaggtgcggtagatataaataaactatgtgaagaaatgctagataatcgtgcgacgttacaagcgatagcgtcggaattttcgtcgctaccgtcgtatgcggcgtttgcgacggcgcaagaagcgtatgaacaagcggtagcgaatggtgattcggaagtagtactaaaaaaattaaaaaaatcgttaaatgtagcgaaatcggaatttgatcgtgatgcggcgatgcaacgtaaattagaaaaaatggcggatcaagcgatgacgcaaatgtataaacaagcgcgttcggaagataaacgtgcgaaagtaacgtcggcgatgcaaacgatgctatttacgatgctacgtaaattagataatgatgcgctaaataatataataaataatgcgcgtgatggttgtgtaccgttaaatataataccgctaacgacggcggcgaaactaatggtagtaataccggattataatacatataaaaatacgtgtgatggtacgacgtttacgtatgcgtcggcgttatgggaaatacaacaagtagtagatgcggattcgaaaatagtacaactatcggaaatatcgatggataattcgccgaatttagcgtggccgctaatagtaacggcgttacgtgcgaattcggcggtaaaattacaaaataatgaactatcgccggtagcgctacgacagatgtcttgtgctgccggtactacacaaactgcttgcactgatgacaatgcgttagcttactacaacacaacaaagggaggtaggtttgtacttgcactgttatccgatttacaggatttgaaatgggctagattccctaagagtgatggaactggtactatctatacagaactggaaccaccttgtaggtttgttacagacacacctaaaggtcctaaagtgaagtatttatactttattaaaggattaaacaacctaaatagaggtatggtacttggtagtttagctgccacagtacgtctacaagctggtaatgcaacagaagtgcctgccaattcaactgtattatctttctgtgcttttgctgtagatgctgctaaagcttacaaagattatctagctagtgggggacaaccaatcactaattgtgttaagatgttgtgtacacacactggtactggtcaggcaataacagttacaccggaagccaatatggatcaagaatcctttggtggtgcatcgtgttgtctgtactgccgttgccacatagatcatccaaatcctaaaggattttgtgacttaaaaggtaagtatgtacaaatacctacaacttgtgctaatgaccctgtgggttttacacttaaaaacacagtctgtaccgtctgcggtatgtggaaaggttatggctgtagttgtgatcaactccgcgaacccatgcttcagtcagctgatgcacaatcgtttttaaacgggtttgcggtgtaagtgcagcccgtcttacaccgtgcggcacaggcactagtactgatgtcgtatacagggcttttgacatctacaatgataaagtagctggttttgctaaattcctaaaaactaattgttgtcgcttccaagaaaaggacgaagatgacaatttaattgattcttactttgtagttaagagacacactttctctaactaccaacatgaagaaacaatttataatttacttaaggattgtccagctgttgctaaacatgacttctttaagtttagaatagacggtgacatggtaccacatatatcacgtcaacgtcttactaaatacacaatggcagacctcgtctatgctttaaggcattttgatgaaggtaattgtgacacattaaaagaaatacttgtcacatacaattgttgtgatgatgattatttcaataaaaaggactggtatgattttgtagaaaacccagatatattacgcgtatacgccaacttaggtgaacgtgtacgccaagctttgttaaaaacagtacaattctgtgatgccatgcgaaatgctggtattgttggtgtactgacattagataatcaagatctcaatggtaactggtatgatttcggtgatttcatacaaaccacgccaggtagtggagttcctgttgtagattcttattattcattgttaatgcctatattaaccttgaccagggctttaactgcagagtcacatgttgacactgacttaacaaagccttacattaagtgggatttgttaaaatatgacttcacggaagagaggttaaaactctttgaccgttattttaaatattgggatcagacataccacccaaattgtgttaactgtttggatgacagatgcattctgcattgtgcaaactttaatgttttattctctacagtgttcccacctacaagttttggaccactagtgagaaaaatatttgttgatggtgttccatttgtagtttcaactggataccacttcagagagctaggtgttgtacataatcaggatgtaaacttacatagctctagacttagttttaaggaattacttgtgtatgctgctgaccctgctatgcacgctgcttctggtaatctattactagataaacgcactacgtgcttttcagtagctgcacttactaacaatgttgcttttcaaactgtcaaacccggtaattttaacaaagacttctatgactttgctgtgtctaagggtttctttaaggaaggaagttctgttgaattaaaacacttcttctttgctcaggatggtaatgctgctatcagcgattatgactactatcgttataatctaccaacaatgtgtgatatcagacaactactatttgtagttgaagttgttgataagtactttgattgttacgatggtggctgtattaatgctaaccaagtcatcgtcaacaacctagacaaatcagctggttttccatttaataaatggggtaaggctagactttattatgattcaatgagttatgaggatcaagatgcacttttcgcatatacaaaacgtaatgtcatccctactataactcaaatgaatcttaagtatgccattagtgcaaagaatagagctcgcaccgtagctggtgtctctatctgtagtactatgaccaatagacagtttcatcaaaaattattgaaatcaatagccgccactagaggagctactgtagtaattggaacaagcaaattctatggtggttggcacaacatgttaaaaactgtttatagtgatgtagaaaaccctcaccttatgggttgggattatcctaaatgtgatagagccatgcctaacatgcttagaattatggcctcacttgttcttgctcgcaaacatacaacgtgttgtagcttgtcacaccgtttctatagattagctaatgagtgtgctcaagtattgagtgaaatggtcatgtgtggcggttcactatatgttaaaccaggtggaacctcatcaggagatgccacaactgcttatgctaatagtgtttttaacatttgtcaagctgtcacggccaatgttaatgcacttttatctactgatggtaacaaaattgccgataagtatgtccgcaatttacaacacagactttatgagtgtctctatagaaatagagatgttgacacagactttgtgaatgagttttacgcatatttgcgtaaacatttctcaatgatgatactctctgacgatgctgttgtgtgtttcaatagcacttatgcatctcaaggtctagtggctagcataaagaactttaagtcagttctttattatcaaaacaatgtttttatgtctgaagcaaaatgttggactgagactgaccttactaaaggacctcatgaattttgctctcaacatacaatgctagttaaacagggtgatgattatgtgtaccttccttacccagatccatcaagaatcctaggggccggctgttttgtagatgatatcgtaaaaacagatggtacacttatgattgaacggttcgtgtctttagctatagatgcttacccacttactaaacatcctaatcaggagtatgctgatgtctttcatttgtacttacaatacataagaaagctacatgatgagttaacaggacacatgttagacatgtattctgttatgcttactaatgataacacttcaaggtattgggaacctgagttttatgaggctatgtacacaccgcatacagtcttacaggctgttggggcttgtgttctttgcaattcacagacttcattaagatgtggtgcttgcatacgtagaccattcttatgttgtaaatgctgttacgaccatgtcatatcaacatcacataaattagtcttgtctgttaatccgtatgtttgcaatgctccaggttgtgatgtcacagatgtgactcaactttacttaggaggtatgagctattattgtaaatcacataaaccacccattagttttccattgtgtgctaatggacaagtttttggtttatataaaaatacatgtgttggtagcgataatgttactgactttaatgcaattgcaacatgtgactggacaaatgctggtgattacattttagctaacacctgtactgaaagactcaagctttttgcagcagaaacgctcaaagctactgaggagacatttaaactgtcttatggtattgctactgtacgtgaagtgctgtctgacagagaattacatctttcatgggaagttggtaaacctagaccaccacttaaccgaaattatgtctttactggttatcgtgtaactaaaaacagtaaagtacaaataggagagtacacctttgaaaaaggtgactatggtgatgctgttgtttaccgaggtacaacaacttacaaattaaatgttggtgattattttgtgctgacatcacatacagtaatgccattaagtgcacctacactagtgccacaagagcactatgttagaattactggcttatacccaacactcaatatctcagatgagttttctagcaatgttgcaaattatcaaaaggttggtatgcaaaagtattctacactccagggaccacctggtactggtaagagtcattttgctattggcctagctctctactacccttctgctcgcatagtgtatacagcttgctctcatgccgctgttgatgcactatgtgagaaggcattaaaatatttgcctatagataaatgtagtagaattatacctgcacgtgctcgtgtagagtgttttgataaattcaaagtgaattcaacattagaacagtatgtcttttgtactgtaaatgcattgcctgagacgacagcagatatagttgtctttgatgaaatttcaatggccacaaattatgatttgagtgttgtcaatgccagattacgtgctaagcactatgtgtacattggcgaccctgctcaattacctgcaccacgcacattgctaactaagggcacactagaaccagaatatttcaattcagtgtgtagacttatgaaaactataggtccagacatgttcctcggaacttgtcggcgttgtcctgctgaaattgttgacactgtgagtgctttggtttatgataataagcttaaagcacataaagacaaatcagctcaatgctttaaaatgttttataagggtgttatcacgcatgatgtttcatctgcaattaacaggccacaaataggcgtggtaagagaattccttacacgtaaccctgcttggagaaaagctgtctttatttcaccttataattcacagaatgctgtagcctcaaagattttgggactaccaactcaaactgttgattcatcacagggctcagaatatgactatgtcatattcactcaaaccactgaaacagctcactcttgtaatgtaaacagatttaatgttgctattaccagagcaaaagtaggcatactttgcataatgtctgatagagacctttatgacaagttgcaatttacaagtcttgaaattccacgtaggaatgtggcaactttacaagctgaaaatgtaacaggactctttaaagattgtagtaaggtaatcactgggttacatcctacacaggcacctacacacctcagtgttgacactaaattcaaaactgaaggtttatgtgttgacatacctggcatacctaaggacatgacctatagaagactcatctctatgatgggttttaaaatgaattatcaagttaatggttaccctaacatgtttatcacccgcgaagaagctataagacatgtacgtgcatggattggcttcgatgtcgaggggtgtcatgctactagagaagctgttggtaccaatttacctttacagctaggtttttctacaggtgttaacctagttgctgtacctacaggttatgttgatacacctaataatacagatttttccagagttagtgctaaaccaccgcctggagatcaatttaaacacctcataccacttatgtacaaaggacttccttggaatgtagtgcgtataaagattgtacaaatgttaagtgacacacttaaaaatctctctgacagagtcgtatttgtcttatgggcacatggctttgagttgacatctatgaagtattttgtgaaaataggacctgagcgcacctgttgtctatgtgatagacgtgccacatgcttttccactgcttcagacacttatgcctgttggcatcattctattggatttgattacgtctataatccgtttatgattgatgttcaacaatggggttttacaggtaacctacaaagcaaccatgatctgtattgtcaagtccatggtaatgcacatgtagctagttgtgatgcaatcatgactaggtgtctagctgtccacgagtgctttgttaagcgtgttgactggactattgaatatcctataattggtgatgaactgaagattaatgcggcttgtagaaaggttcaacacatggttgttaaagctgcattattagcagacaaattcccagttcttcacgacattggtaaccctaaagctattaagtgtgtacctcaagctgatgtagaatggaagttctatgatgcacagccttgtagtgacaaagcttataaaatagaagaattattctattcttatgccacacattctgacaaattcacagatggtgtatgcctattttggaattgcaatgtcgatagatatcctgctaattccattgtttgtagatttgacactagagtgctatctaaccttaacttgcctggttgtgatggtggcagtttgtatgtaaataaacatgcattccacacaccagcttttgataaaagtgcttttgttaatttaaaacaattaccatttttctattactctgacagtccatgtgagtctcatggaaaacaagtagtgtcagatatagattatgtaccactaaagtctgctacgtgtataacacgttgcaatttaggtggtgctgtctgtagacatcatgctaatgagtacagattgtatctcgatgcttataacatgatgatctcagctggctttagcttgtgggtttacaaacaatttgatacttataacctctggaacacttttacaagacttcagagtttagaaaatgtggcttttaatgttgtaaataagggacactttgatggacaacagggtgaagtaccagtttctatcattaataacactgtttacacaaaagttgatggtgttgatgtagaattgtttgaaaataaaacaacattacctgttaatgtagcatttgagctttgggctaagcgcaacattaaaccagtaccagaggtgaaaatactcaataatttgggtgtggacattgctgctaatactgtgatctgggactacaaaagagatgctccagcacatatatctactattggtgtttgttctatgactgacatagccaagaaaccaactgaaacgatttgtgcaccactcactgtcttttttgatggtagagttgatggtcaagtagacttatttagaaatgcccgtaatggtgttcttattacagaaggtagtgttaaaggtttacaaccatctgtaggtcccaaacaagctagtcttaatggagtcacattaattggagaagccgtaaaaacacagttcaattattataagaaagttgatggtgttgtccaacaattacctgaaacttactttactcagagtagaaatttacaagaatttaaacccaggagtcaaatggaaattgatttcttagaattagctatggatgaattcattgaacggtataaattagaaggctatgccttcgaacatatcgtttatggagattttagtcatagtcagttaggtggtttacatctactgattggactagctaaacgttttaaggaatcaccttttgaattagaagattttattcctatggacagtacagttaaaaactatttcataacagatgcgcaaacaggttcatctaagtgtgtgtgttctgttattgatttattacttgatgattttgttgaaataataaaatcccaagatttatctgtagtttctaaggttgtcaaagtgactattgactatacagaaatttcatttatgctttggtgtaaagatggccatgtagaaacattttacccaaaattacaatctagtcaagcgtggcaaccgggtgttgctatgcctaatctttacaaaatgcaaagaatgctattagaaaagtgtgaccttcaaaattatggtgatagtgcaacattacctaaaggcataatgatgaatgtcgcaaaatatactcaactgtgtcaatatttaaacacattaacattagctgtaccctataatatgagagttatacattttggtgctggttctgataaaggagttgcaccaggtacagctgttttaagacagtggttgcctacgggtacgctgcttgtcgattcagatcttaatgactttgtctctgatgcagattcaactttgattggtgattgtgcaactgtacatacagctaataaatgggatctcattattagtgatatgtacgaccctaagactaaaaatgttacaaaagaaaatgactctaaagagggttttttcacttacatttgtgggtttatacaacaaaagctagctcttggaggttccgtggctataaagataacagaacattcttggaatgctgatctttataagctcatgggacacttcgcatggtggacagcctttgttactaatgtgaatgcgtcatcatctgaagcatttttaattggatgtaattatcttggcaaaccacgcgaacaaatagatggttatgtcatgcatgcaaattacatattttggaggaatacaaatccaattcagttgtcttcctattctttatttgacatgagtaaatttccccttaaattaaggggtactgctgttatgtctttaaaagaaggtcaaatcaatgatatgattttatctcttcttagtaaaggtagacttataattagagaaaacaacagagttgttatttctagtgatgttcttgttaacaactaaacgaacaatgtttgtttttcttgttttattgccactagtctctagtcagtgtgttaatcttacaaccagaactcaattaccccctgcatacactaattctttcacacgtggtgtttattaccctgacaaagttttcagatcctcagttttacattcaactcaggacttgttcttacctttcttttccaatgttacttggttccatgctatacatgtctctgggaccaatggtactaagaggtttgataaccctgtcctaccatttaatgatggtgtttattttgcttccactgagaagtctaacataataagaggctggatttttggtactactttagattcgaagacccagtccctacttattgttaataacgctactaatgttgttattaaagtctgtgaatttcaattttgtaatgatccatttttgggtgtttattaccacaaaaacaacaaaagttggatggaaagtgagttcagagtttattctagtgcgaataattgcacttttgaatatgtctctcagccttttcttatggaccttgaaggaaaacagggtaatttcaaaaatcttagggaatttgtgtttaagaatattgatggttattttaaaatatattctaagcacacgcctattaatttagtgcgtgatctcccccagggtttttcggctttagaaccattggtagatttgccaataggtattaacatcactaggtttcaaactttacttgctttacatagaagttatttgactcctggtgattcttcttcaggttggacagctggtgctgcagcttattatgtgggttatcttcaacctaggacttttctattaaaatataatgaaaatggaaccattacagatgctgtagactgtgcacttgaccctctctcagaaacaaagtgtacgttgaaatccttcactgtagaaaaaggaatctatcaaacttctaactttagagtccaaccaacagaatctattgttagatttcctaatattacaaacttgtgcccttttggtgaagtttttaacgccaccagatttgcatctgtttatgcttggaacaggaagagaatcagcaactgtgttgctgattattctgtcctatataattccgcatcattttccacttttaagtgttatggagtgtctcctactaaattaaatgatctctgctttactaatgtctatgcagattcatttgtaattagaggtgatgaagtcagacaaatcgctccagggcaaactggaaagattgctgattataattataaattaccagatgattttacaggctgcgttatagcttggaattctaacaatcttgattctaaggttggtggtaattataattacctgtatagattgtttaggaagtctaatctcaaaccttttgagagagatatttcaactgaaatctatcaggccggtagcacaccttgtaatggtgttgaaggttttaattgttactttcctttacaatcatatggtttccaacccactaatggtgttggttaccaaccatacagagtagtagtactttcttttgaacttctacatgcaccagcaactgtttgtggacctaaaaagtctactaatttggttaaaaacaaatgtgtcaatttcaacttcaatggtttaacaggcacaggtgttcttactgagtctaacaaaaagtttctgcctttccaacaatttggcagagacattgctgacactactgatgctgtccgtgatccacagacacttgagattcttgacattacaccatgttcttttggtggtgtcagtgttataacaccaggaacaaatacttctaaccaggttgctgttctttatcaggatgttaactgcacagaagtccctgttgctattcatgcagatcaacttactcctacttggcgtgtttattctacaggttctaatgtttttcaaacacgtgcaggctgtttaataggggctgaacatgtcaacaactcatatgagtgtgacatacccattggtgcaggtatatgcgctagttatcagactcagactaattctcctcggcgggcacgtagtgtagctagtcaatccatcattgcctacactatgtcacttggtgcagaaaattcagttgcttactctaataactctattgccatacccacaaattttactattagtgttaccacagaaattctaccagtgtctatgaccaagacatcagtagattgtacaatgtacatttgtggtgattcaactgaatgcagcaatcttttgttgcaatatggcagtttttgtacacaattaaaccgtgctttaactggaatagctgttgaacaagacaaaaacacccaagaagtttttgcacaagtcaaacaaatttacaaaacaccaccaattaaagattttggtggttttaatttttcacaaatattaccagatccatcaaaaccaagcaagaggtcatttattgaagatctacttttcaacaaagtgacacttgcagatgctggcttcatcaaacaatatggtgattgccttggtgatattgctgctagagacctcatttgtgcacaaaagtttaacggccttactgttttgccacctttgctcacagatgaaatgattgctcaatacacttctgcactgttagcgggtacaatcacttctggttggacctttggtgcaggtgctgcattacaaataccatttgctatgcaaatggcttataggtttaatggtattggagttacacagaatgttctctatgagaaccaaaaattgattgccaaccaatttaatagtgctattggcaaaattcaagactcactttcttccacagcaagtgcacttggaaaacttcaagatgtggtcaaccaaaatgcacaagctttaaacacgcttgttaaacaacttagctccaattttggtgcaatttcaagtgttttaaatgatatcctttcacgtcttgacaaagttgaggctgaagtgcaaattgataggttgatcacaggcagacttcaaagtttgcagacatatgtgactcaacaattaattagagctgcagaaatcagagcttctgctaatcttgctgctactaaaatgtcagagtgtgtacttggacaatcaaaaagagttgatttttgtggaaagggctatcatcttatgtccttccctcagtcagcacctcatggtgtagtcttcttgcatgtgacttatgtccctgcacaagaaaagaacttcacaactgctcctgccatttgtcatgatggaaaagcacactttcctcgtgaaggtgtctttgtttcaaatggcacacactggtttgtaacacaaaggaatttttatgaaccacaaatcattactacagacaacacatttgtgtctggtaactgtgatgttgtaataggaattgtcaacaacacagtttatgatcctttgcaacctgaattagactcattcaaggaggagttagataaatattttaagaatcatacatcaccagatgttgatttaggtgacatctctggcattaatgcttcagttgtaaacattcaaaaagaaattgaccgcctcaatgaggttgccaagaatttaaatgaatctctcatcgatctccaagaacttggaaagtatgagcagtatataaaatggccatggtacatttggctaggttttatagctggcttgattgccatagtaatggtgacaattatgctttgctgtatgaccagttgctgtagttgtctcaagggctgttgttcttgtggatcctgctgcaaatttgatgaagacgactctgagccagtgctcaaaggagtcaaattacattacacataaacgaacttatggatttgtttatgagaatcttcacaattggaactgtaactttgaagcaaggtgaaatcaaggatgctactccttcagattttgttcgcgctactgcaacgataccgatacaagcctcactccctttcggatggcttattgttggcgttgcacttcttgctgtttttcagagcgcttccaaaatcataaccctcaaaaagagatggcaactagcactctccaagggtgttcactttgtttgcaacttgctgttgttgtttgtaacagtttactcacaccttttgctcgttgctgctggccttgaagccccttttctctatctttatgctttagtctacttcttgcagagtataaactttgtaagaataataatgaggctttggctttgctggaaatgccgttccaaaaacccattactttatgatgccaactattttctttgctggcatactaattgttacgactattgtataccttacaatagtgtaacttcttcaattgtcattacttcaggtgatggcacaacaagtcctatttctgaacatgactaccagattggtggttatactgaaaaatgggaatctggagtaaaagactgtgttgtattacacagttacttcacttcagactattaccagctgtactcaactcaattgagtacagacactggtgttgaacatgttaccttcttcatctacaataaaattgttgatgagcctgaagaacatgtccaaattcacacaatcgacggttcatccggagttgttaatccagtaatggaaccaatttatgatgaaccgacgacgactactagcgtgcctttgtaagcacaagctgatgagtacgaacttatgtactcattcgtttcggaagagacaggtacgttaatagttaatagcgtacttctttttcttgctttcgtggtattcttgctagttacactagccatccttactgcgcttcgattgtgtgcgtactgctgcaatattgttaacgtgagtcttgtaaaaccttctttttacgtttactctcgtgttaaaaatctgaattcttctagagttcctgatcttctggtctaaacgaactaaatattatattagtttttctgtttggaactttaattttagccatggcagattccaacggtactattaccgttgaagagcttaaaaagctccttgaacaatggaacctagtaataggtttcctattccttacatggatttgtcttctacaatttgcctatgccaacaggaataggtttttgtatataattaagttaattttcctctggctgttatggccagtaactttagcttgttttgtgcttgctgctgtttacagaataaattggatcaccggtggaattgctatcgcaatggcttgtcttgtaggcttgatgtggctcagctacttcattgcttctttcagactgtttgcgcgtacgcgatccatgtggtcattcaatccagaaactaacattcttctcaacgtgccactccatggcactattctgaccagaccgcttctagaaagtgaactcgtaatcggagctgtgatccttcgtggacatcttcgtattgctggacaccatctaggacgctgtgacatcaaggacctgcctaaagaaatcactgttgctacatcacgaacgctttcttattacaaattgggagcttcgcagcgtgtagcaggtgactcaggttttgctgcatacagtcgctacaggattggcaactataaattaaacacagaccattccagtagcagtgacaatattgctttgcttgtacagtaagtgacaacagatgtttcatctcgttgactttcaggttactatagcagagatattactaattattatgaggacttttaaagtttccatttggaatcttgattacatcataaacctcataattaaaaatttatctaagtcactaactgagaataaatattctcaattagatgaagagcaaccaatggagattgattaaacgaacatgaaaattattcttttcttggcactgataacactcgctacttgtgagctttatcactaccaagagtgtgttagaggtacaacagtacttttaaaagaaccttgctcttctggaacatacgagggcaattcaccatttcatcctctagctgataacaaatttgcactgacttgctttagcactcaatttgcttttgcttgtcctgacggcgtaaaacacgtctatcagttacgtgccagatcagtttcacctaaactgttcatcagacaagaggaagttcaagaactttactctccaatttttcttattgttgcggcaatagtgtttataacactttgcttcacactcaaaagaaagacagaatgattgaactttcattaattgacttctatttgtgctttttagcctttctgctattccttgttttaattatgcttattatcttttggttctcacttgaactgcaagatcataatgaaacttgtcacgcctaaacgaacatgaaatttcttgttttcttaggaatcatcacaactgtagctgcatttcaccaagaatgtagtttacagtcatgtactcaacatcaaccatatgtagttgatgacccgtgtcctattcacttctattctaaatggtatattagagtaggagctagaaaatcagcacctttaattgaattgtgcgtggatgaggctggttctaaatcacccattcagtacatcgatatcggtaattatacagtttcctgtttaccttttacaattaattgccaggaacctaaattgggtagtcttgtagtgcgttgttcgttctatgaagactttttagagtatcatgacgttcgtgttgttttagatttcatctaaacgaacaaactaaaatgtctgataatggaccccaaaatcagcgaaatgcaccccgcattacgtttggtggaccctcagattcaactggcagtaaccagaatggagaacgcagtggggcgcgatcaaaacaacgtcggccccaaggtttacccaataatactgcgtcttggttcaccgctctcactcaacatggcaaggaagaccttaaattccctcgaggacaaggcgttccaattaacaccaatagcagtccagatgaccaaattggctactaccgaagagctaccagacgaattcgtggtggtgacggtaaaatgaaagatctcagtccaagatggtatttctactacctaggaactgggccagaagctggacttccctatggtgctaacaaagacggcatcatatgggttgcaactgagggagccttgaatacaccaaaagatcacattggcacccgcaatcctgctaacaatgctgcaatcgtgctacaacttcctcaaggaacaacattgccaaaaggcttctacgcagaagggagcagaggcggcagtcaagcctcttctcgttcctcatcacgtagtcgcaacagttcaagaaattcaactccaggcagcagtaggggaacttctcctgctagaatggctggcaatggcggtgatgctgctcttgctttgctgctgcttgacagattgaaccagcttgagagcaaaatgtctggtaaaggccaacaacaacaaggccaaactgtcactaagaaatctgctgctgaggcttctaagaagcctcggcaaaaacgtactgccactaaagcatacaatgtaacacaagctttcggcagacgtggtccagaacaaacccaaggaaattttggggaccaggaactaatcagacaaggaactgattacaaacattggccgcaaattgcacaatttgcccccagcgcttcagcgttcttcggaatgtcgcgcattggcatggaagtcacaccttcgggaacgtggttgacctacacaggtgccatcaaattggatgacaaagatccaaatttcaaagatcaagtcattttgctgaataagcatattgacgcatacaaaacattcccaccaacagagcctaaaaaggacaaaaagaagaaggctgatgaaactcaagccttaccgcagagacagaagaaacagcaaactgtgactcttcttcctgctgcagatttggatgatttctccaaacaattgcaacaatccatgagcagtgctgactcaactcaggcctaaactcatgcagaccacacaaggcagatgggctatataaacgttttcgcttttccgtttacgatatatagtctactcttgtgcagaatgaattctcgtaactacatagcacaagtagatgtagttaactttaatctcacatagcaatctttaatcagtgtgtaacattagggaggacttgaaagagccaccacattttcaccgaggccacgcggagtacgatcgagtgtacagtgaacaatgctagggagagctgcctatatggaagagccctaatgtgtaaaattaattttagtagtgctatccccatgtgattttaatagcttcttaggagaatgacaaaaaaaaaaaaaaaaaaaaaaaaaaaaaaaaaaaaaaaaaaaaaaaaaaaaaaaaaaagggtcggcatggcatctccacctcctcgcggtccgacctgggcatccgaaggaggacgcacgtccactcggatggctaagggagcagcacactggcggccgttactagggccgcgcccttcccaacagttgcgcagcctgaatggcgaatggagatccaatttttaagtgtataatgtgttaaactactgattctaattgtttgtgtattttagattcacagtcccaaggctcatttcaggcccctcagtcctcacagtctgttcatgatcataatcagccataccacatttgtagaggttttacttgctttaaaaaacctcccacacctccccctgaacctgaaacataaaatgaatgcaattgttgttgttaacttgtttattgcagcttataatggttacaaataaagcaatagcatcacaaatttcacaaataaagcatttttttcactgcattctagttgtggtttgtccaaactcatcaatgtatcttaaagcttgagtattctatagtctcacctaaatagcttggcgtaatcatggtcatagctgtttcctgtgtgaaattgttatccgctcacaattccacacaacatacgagccggaagcataaagtgtaaagcctggggtgcctaatgagtgagctaactcacattaattgcgttgcgctcactgcccgctttccagtcgggaaacctgtcgtgccagctgcattaatgaatcggccaacgcgaaccccttgcggccgcccgggccgtcgaccaattctcatgtttgacagcttatcatcgaatttctgccattcatccgcttattatcacttattcaggcgtagcaaccaggcgtttaagggcaccaataactgccttaaaaaaattacgccccgccctgccactcatcgcagtactgttgtaattcattaagcattctgccgacatggaagccatcacaaacggcatgatgaacctgaatcgccagcggcatcagcaccttgtcgccttgcgtataatatttgcccatggtgaaaacgggggcgaagaagttgtccatattggccacgtttaaatcaaaactggtgaaactcacccagggattggctgagacgaaaaacatattctcaataaaccctttagggaaataggccaggttttcaccgtaacacgccacatcttgcgaatatatgtgtagaaactgccggaaatcgtcgtggtattcactccagagcgatgaaaacgtttcagtttgctcatggaaaacggtgtaacaagggtgaacactatcccatatcaccagctcaccgtctttcattgccatacgaaattccggatgagcattcatcaggcgggcaagaatgtgaataaaggccggataaaacttgtgcttatttttctttacggtctttaaaaaggccgtaatatccagctgaacggtctggttataggtacattgagcaactgactgaaatgcctcaaaatgttctttacgatgccattgggatatatcaacggtggtatatccagtgatttttttctccattttagcttccttagctcctgaaaatctcgataactcaaaaaatacgcccggtagtgatcttatttcattatggtgaaagttggaacctcttacgtgccgatcaacgtctcattttcgccaaaagttggcccagggcttcccggtatcaacagggacaccaggatttatttattctgcgaagtgatcttccgtcacaggtatttattcgcgataagctcatggagcggcgtaaccgtcgcacaggaaggacagagaaagcgcggatctgggaagtgacggacagaacggtcaggacctggattggggaggcggttgccgccgctgctgctgacggtgtgacgttctctgttccggtcacaccacatacgttccgccattcctatgcgatgcacatgctgtatgccggtataccgctgaaagttctgcaaagcctgatgggacataagtccatcagttcaacggaagtctacacgaaggtttttgcgctggatgtggctgcccggcaccgggtgcagtttgcgatgccggagtctgatgcggttgcgatgctgaaacaattatcctgagaataaatgccttggcctttatatggaaatgtggaactgagtggatatgctgtttttgtctgttaaacagagaagctggctgttatccactgagaagcgaacgaaacagtcgggaaaatctcccattatcgtagagatccgcattattaatctcaggagcctgtgtagcgtttataggaagtagtgttctgtcatgatgcctgcaagcggtaacgaaaacgatttgaatatgccttcaggaacaatagaaatcttcgtgcggtgttacgttgaagtggagcggattatgtcagcaatggacagaacaacctaatgaacacagaaccatgatgtggtctgtccttttacagccagtagtgctcgccgcagtcgagcgacagggcgaagccctcggctggttgccctcgccgctgggctggcggccgtctatggccctgcaaacgcgccagaaacgccgtcgaagccgtgtgcgagacaccgcggccggccgccggcgttgtggatacctcgcggaaaacttggccctcactgacagatgaggggcggacgttgacacttgaggggccgactcacccggcgcggcgttgacagatgaggggcaggctcgatttcggccggcgacgtggagctggccagcctcgcaaatcggcgaaaacgcctgattttacgcgagtttcccacagatgatgtggacaagcctggggataagtgccctgcggtattgacacttgaggggcgcgactactgacagatgaggggcgcgatccttgacacttgaggggcagagtgctgacagatgaggggcgcacctattgacatttgaggggctgtccacaggcagaaaatccagcatttgcaagggtttccgcccgtttttcggccaccgctaacctgtcttttaacctgcttttaaaccaatatttataaaccttgtttttaaccagggctgcgccctgtgcgcgtgaccgcgcacgccgaaggggggtgcccccccttctcgaaccctcccggtcgagtgagcgaggaagcaccagggaacagcacttatatattctgcttacacacgatgcctgaaaaaacttcccttggggttatccacttatccacggggatatttttataattattttttttatagtttttagatcttcttttttagagcgccttgtaggcctttatccatgctggttctagagaaggtgttgtgacaaattgccctttcagtgtgacaaatcaccctcaaatgacagtcctgtctgtgacaaattgcccttaaccctgtgacaaattgccctcagaagaagctgttttttcacaaagttatccctgcttattgactcttttttatttagtgtgacaatctaaaaacttgtcacacttcacatggatctgtcatggcggaaacagcggttatcaatcacaagaaacgtaaaaatagcccgcgaatcgtccagtcaaacgacctcactgaggcggcatatagtctctcccgggatcaaaaacgtatgctgtatctgttcgttgaccagatcagaaaatctgatggcaccctacaggaacatgacggtatctgcgagatccatgttgctaaatatgctgaaatattcggattgacctctgcggaagccagtaaggatatacggcaggcattgaagagtttcgcggggaaggaagtggttttttatcgccctgaagaggatgccggcgatgaaaaaggctatgaatcttttccttggtttatcaaacgtgcgcacagtccatccagagggctttacagtgtacatatcaacccatatctcattcccttctttatcgggttacagaaccggtttacgcagtttcggcttagtgaaacaaaagaaatcaccaatccgtatgccatgcgtttatacgaatccctgtgtcagtatcgtaagccggatggctcaggcatcgtctctctgaaaatcgactggatcatagagcgttaccagctgcctcaaagttaccagcgtatgcctgacttccgccgccgcttcctgcaggtctgtgttaatgagatcaacagcagaactccaatgcgcctctcatacattgagaaaaagaaaggccgccagacgactcatatcgtattttccttccgcgatatcacttccatgacgacaggatagtctgagggttatctgtcacagatttgagggtggttcgtcacatttgttctgacctactgagggtaatttgtcacagttttgctgtttccttcagcctgcatggattttctcatactttttgaactgtaatttttaaggaagccaaatttgagggcagtttgtcacagttgatttccttctctttcccttcgtcatgtgacctgatatcgggggttagttcgtcatcattgatgagggttgattatcacagtttattactctgaattggctatccgcgtgtgtacctctacctggagtttttcccacggtggatatttcttcttgcgctgagcgtaagagctatctgacagaacagttcttctttgcttcctcgccagttcgctcgctatgctcggttacacggctgcggcg

SEQ ID NO: 29 - DNA, 35283 bp, Artificial Sequence
  Clone pCCI-4K-SARS-CoV-2-WWWDW. Based on SARS-CoV-2.
gatgtgctgcaaggcgattaagttgggtaacgccagggttttcccagtcacgacgttgtaaaacgacggccagtgaattgtaatacgactcactatagggcgaattctagttattaatagtaatcaattacggggtcattagttcatagcccatatatggagttccgcgttacataacttacggtaaatggcccgcctggctgaccgcccaacgacccccgcccattgacgtcaataatgacgtatgttcccatagtaacgccaatagggactttccattgacgtcaatgggtggagtatttacggtaaactgcccacttggcagtacatcaagtgtatcatatgccaagtacgccccctattgacgtcaatgacggtaaatggcccgcctggcattatgcccagtacatgaccttatgggactttcctacttggcagtacatctacgtattagtcatcgctattaccatggtgatgcggttttggcagtacatcaatgggcgtggatagcggtttgactcacggggatttccaagtctccaccccattgacgtcaatgggagtttgttttggcaccaaaatcaacgggactttccaaaatgtcgtaacaactccgccccattgacgcaaatgggcggtaggcgtgtacggtgggaggtctatataagcagagctggtttagtgaaccgtattaaaggtttataccttcccaggtaacaaaccaaccaactttcgatctcttgtagatctgttctctaaacgaactttaaaatctgtgtggctgtcactcggctgcatgcttagtgcactcacgcagtataattaataactaattactgtcgttgacaggacacgagtaactcgtctatcttctgcaggctgcttacggtttcgtccgtgttgcagccgatcatcagcacatctaggtttcgtccgggtgtgaccgaaaggtaagatggagagccttgtccctggtttcaacgagaaaacacacgtccaactcagtttgcctgttttacaggttcgcgacgtgctcgtacgtggctttggagactccgtggaggaggtcttatcagaggcacgtcaacatcttaaagatggcacttgtggcttagtagaagttgaaaaaggcgttttgcctcaacttgaacagccctatgtgttcatcaaacgttcggatgctcgaactgcacctcatggtcatgttatggttgagctggtagcagaactcgaaggcattcagtacggtcgtagtggtgagacacttggtgtccttgtccctcatgtgggcgaaataccagtggcttaccgcaaggttcttcttcgtaagaacggtaataaaggagctggtggccatagttacggcgccgatctaaagtcatttgacttaggcgacgagcttggcactgatccttatgaagattttcaagaaaactggaacactaaacatagcagtggtgttacccgtgaactcatgcgtgagcttaacggaggggcatacactcgctatgtcgataacaacttctgtggccctgatggctaccctcttgagtgcattaaagaccttctagcacgtgctggtaaagcttcatgcactttgtccgaacaactggactttattgacactaagaggggtgtatactgctgccgtgaacatgagcatgaaattgcttggtacacggaacgttctgaaaagagctatgaattgcagacaccttttgaaattaaattggcaaagaaatttgacaccttcaatggggaatgtccaaattttgtatttcccttaaattccataatcaagactattcaaccaagggttgaaaagaaaaagcttgatggctttatgggtagaattcgatctgtctatccagttgcgtcaccaaatgaatgcaaccaaatgtgcctttcaactctcatgaagtgtgatcattgtggtgaaacttcatggcagacgggcgattttgttaaagccacttgcgaattttgtggcactgagaatttgactaaagaaggtgccactacttgtggttacttaccccaaaatgctgttgttaaaatttattgtccagcatgtcacaattcagaagtaggacctgagcatagtcttgccgaataccataatgaatctggcttgaaaaccattcttcgtaagggtggtcgcactattgcctttggaggctgtgtgttctcttatgttggttgccataacaagtgtgcctattgggtcccacgtgctagcgctaacataggttgtaaccatacaggtgttgttggagaaggttccgaaggtcttaatgacaaccttcttgaaatactccaaaaagagaaagtcaacatcaatattgttggtgactttaaacttaatgaagagatcgccattattttggcatctttttctgcttccacaagtgcttttgtggaaactgtgaaaggtttggattataaagcattcaaacaaattgttgaatcctgtggtaattttaaagttacaaaaggaaaagctaaaaaaggtgcctggaatattggtgaacagaaatcaatactgagtcctctttatgcatttgcatcagaggctgctcgtgttgtacgatcaattttctcccgcactcttgaaactgctcaaaattctgtgcgtgttttacagaaggccgctataacaatactagatggaatttcacagtattcactgagactcattgatgctatgatgttcacatctgatttggctactaacaatctagttgtaatggcctacattacaggtggtgttgttcagttgacttcgcagtggctaactaacatctttggcactgtttatgaaaaactcaaacccgtccttgattggcttgaagagaagtttaaggaaggtgtagagtttcttagagacggttgggaaattgttaaatttatctcaacctgtgcttgtgaaattgtcggtggacaaattgtcacctgtgcaaaggaaattaaggagagtgttcagacattctttaagcttgtaaataaatttttggctttgtgtgctgactctatcattattggtggagctaaacttaaagccttgaatttaggtgaaacatttgtcacgcactcaaagggattgtacagaaagtgtgttaaatccagagaagaaactggcctactcatgcctctaaaagccccaaaagaaattatcttcttagagggagaaacacttcccacagaagtgttaacagaggaagttgtcttgaaaactggtgatttacaaccattagaacaacctactagtgaagctgttgaagctccattggttggtacaccagtttgtattaacgggcttatgttgctcgaaatcaaagacacagaaaagtactgtgcccttgcacctaatatgatggtaacaaacaataccttcacactcaaaggcggtgcaccaacaaaggttacttttggtgatgacactgtgatagaagtgcaaggttacaagagtgtgaatatcacttttgaacttgatgaaaggattgataaagtacttaatgagaagtgctctgcctatacagttgaactcggtacagaagtaaatgagttcgcctgtgttgtggcagatgctgtcataaaaactttgcaaccagtatctgaattacttacaccactgggcattgatttagatgagtggagtatggctacatactacttatttgatgagtctggtgagtttaaattggcttcacatatgtattgttctttctaccctccagatgaggatgaagaagaaggtgattgtgaagaagaagagtttgagccatcaactcaatatgagtatggtactgaagatgattaccaaggtaaacctttggaatttggtgccacttctgctgctcttcaacctgaagaagagcaagaagaagattggttagatgatgatagtcaacaaactgttggtcaacaagacggcagtgaggacaatcagacaactactattcaaacaattgttgaggttcaacctcaattagagatggaacttacaccagttgttcagactattgaagtgaatagttttagtggttatttaaaacttactgacaatgtatacattaaaaatgcagacattgtggaagaagctaaaaaggtaaaaccaacagtggttgttaatgcagccaatgtttaccttaaacatggaggaggtgttgcaggagccttaaataaggctactaacaatgccatgcaagttgaatctgatgattacatagctactaatggaccacttaaagtgggtggtagttgtgttttaagcggacacaatcttgctaaacactgtcttcatgttgtcggcccaaatgttaacaaaggtgaagacattcaacttcttaagagtgcttatgaaaattttaatcagcacgaagttctacttgcaccattattatcagctggtatttttggtgctgaccctatacattctttaagagtttgtgtagatactgttcgcacaaatgtctacttagctgtctttgataaaaatctctatgacaaacttgtttcaagctttttggaaatgaagagtgaaaagcaagttgaacaaaagatcgctgagattcctaaagaggaagttaagccatttataactgaaagtaaaccttcagttgaacagagaaaacaagatgataagaaaatcaaagcttgtgttgaagaagttacaacaactctggaagaaactaagttcctcacagaaaacttgttactttatattgacattaatggcaatcttcatccagattctgccactcttgttagtgacattgacatcactttcttaaagaaagatgctccatatatagtgggtgatgttgttcaagagggtgttttaactgctgtggttatacctactaaaaaggctggtggcactactgaaatgctagcgaaagctttgagaaaagtgccaacagacaattatataaccacttacccgggtcagggtttaaatggttacactgtagaggaggcaaagacagtgcttaaaaagtgtaaaagtgccttttacattctaccatctattatctctaatgagaagcaagaaattcttggaactgtttcttggaatttgcgagaaatgcttgcacatgcagaagaaacacgcaaattaatgcctgtctgtgtggaaactaaagccatagtttcaactatacagcgtaaatataagggtattaaaatacaagagggtgtggttgattatggtgctagattttacttttacaccagtaaaacaactgtagcgtcacttatcaacacacttaacgatctaaatgaaactcttgttacaatgccacttggctatgtaacacatggcttaaatttggaagaagctgctcggtatatgagatctctcaaagtgccagctacagtttctgtttcttcacctgatgctgttacagcgtataatggttatcttacttcttcttctaaaacacctgaagaacattttattgaaaccatctcacttgctggttcctataaagattggtcctattctggacaatctacacaactaggtatagaatttcttaagagaggtgataaaagtgtatattacactagtaatcctaccacattccacctagatggtgaagttatcacctttgacaatcttaagacacttctttctttgagagaagtgaggactattaaggtgtttacaacagtagacaacattaacctccacacgcaagttgtggacatgtcaatgacatatggacaacagtttggtccaacttatttggatggagctgatgttactaaaataaaacctcataattcacatgaaggtaaaacattttatgttttacctaatgatgacactctacgtgttgaggcttttgagtactaccacacaactgatcctagttttctgggtaggtacatgtcagcattaaatcacactaaaaagtggaaatacccacaagttaatggtttaacttctattaaatgggcagataacaactgttatcttgccactgcattgttaacactccaacaaatagagttgaagtttaatccacctgctctacaagatgcttattacagagcaagggctggtgaagctgctaacttttgtgcacttatcttagcctactgtaataagacagtaggtgagttaggtgatgttagagaaacaatgagttacttgtttcaacatgccaatttagattcttgcaaaagagtcttgaacgtggtgtgtaaaacttgtggacaacagcagacaacccttaagggtgtagaagctgttatgtacatgggcacactttcttatgaacaatttaagaaaggtgttcagataccttgtacgtgtggtaaacaagctacaaaatatctagtacaacaggagtcaccttttgttatgatgtcagcaccacctgctcagtatgaacttaagcatggtacatttacttgtgctagtgagtacactggtaattaccagtgtggtcactataaacatataacttctaaagaaactttgtattgcatagacggtgctttacttacaaagtcctcagaatacaaaggtcctattacggatgttttctacaaagaaaacagttacacaacaaccataaaaccagttacttataaattggatggtgttgtttgtacagaaattgaccctaagttggacaattattataagaaagacaattcttatttcacagagcaaccaattgatcttgtaccaaaccaaccatatccaaacgcaagcttcgataattttaagtttgtatgtgataatatcaaatttgctgatgatttaaaccagttaactggttataagaaacctgcttcaagagagcttaaagttacatttttccctgacttaaatggtgatgtggtggctattgattataaacactacacaccctcttttaagaaaggagctaaattgttacataaacctattgtttggcatgttaacaatgcaactaataaagccacgtataaaccaaatacctggtgtatacgttgtctttggagcacaaaaccagttgaaacatcaaattcgtttgatgtactgaagtcagaggacgcgcagggaatggataatcttgcctgcgaagatctaaaaccagtctctgaagaagtagtggaaaatcctaccatacagaaagacgttcttgagtgtaatgtgaaaactaccgaagttgtaggagacattatacttaaaccagcaaataatagtttaaaaattacagaagaggttggccacacagatctaatggctgcttatgtagacaattctagtcttactattaagaaacctaatgaattatctagagtattaggtttgaaaacccttgctactcatggtttagctgctgttaatagtgtcccttgggatactatagctaattatgctaagccttttcttaacaaagttgttagtacaactactaacatagttacacggtgtttaaaccgtgtttgtactaattatatgccttatttctttactttattgctacaattgtgtacttttactagaagtacaaattctagaattaaagcatctatgccgactactatagcaaagaatactgttaagagtgtcggtaaattttgtctagaggcttcatttaattatttgaagtcacctaatttttctaaactgataaatattataatttggtttttactattaagtgtttgcctaggttctttaatctactcaaccgctgctttaggtgttttaatgtctaatttaggcatgccttcttactgtactggttacagagaaggctatttgaactctactaatgtcactattgcaacctactgtactggttctataccttgtagtgtttgtcttagtggtttagattctttagacacctatccttctttagaaactatacaaattaccatttcatcttttaaatgggatttaactgcttttggcttagttgcagagtggtttttggcatatattcttttcactaggtttttctatgtacttggattggctgcaatcatgcaattgtttttcagctattttgcagtacattttattagtaattcttggcttatgtggttaataattaatcttgtacaaatggccccgatttcagctatggttagaatgtacatcttctttgcatcattttattatgtatggaaaagttatgtgcatgttgtagacggttgtaattcatcaacttgtatgatgtgttacaaacgtaatagagcaacaagagtcgaatgtacaactattgttaatggtgttagaaggtccttttatgtctatgctaatggaggtaaaggcttttgcaaactacacaattggaattgtgttaattgtgatacattctgtgctggtagtacatttattagtgatgaagttgcgagagacttgtcactacagtttaaaagaccaataaatcctactgaccagtcttcttacatcgttgatagtgttacagtgaagaatggttccatccatctttactttgataaagctggtcaaaagacttatgaaagacattctctctctcattttgttaacttagacaacctgagagctaataacactaaaggttcattgcctattaatgttatagtttttgatggtaaatcaaaatgtgaagaatcatctgcaaaatcagcgtctgtttactacagtcagcttatgtgtcaacctatactgttactagatcaggcattagtgtctgatgttggtgatagtgcggaagttgcagttaaaatgtttgatgcttacgttaatacgttttcatcaacttttaacgtaccaatggaaaaactcaaaacactagttgcaactgcagaagctgaacttgcaaagaatgtgtccttagacaatgtcttatctacttttatttcagcagctcggcaagggtttgttgattcagatgtagaaactaaagatgttgttgaatgtcttaaattgtcacatcaatctgacatagaagttactggcgatagttgtaataactatatgctcacctataacaaagttgaaaacatgacaccccgtgaccttggtgcttgtattgactgtagtgcgcgtcatattaatgcgcaggtagcaaaaagtcacaacattgctttgatatggaacgttaaagatttcatgtcattgtctgaacaactacgaaaacaaatacgtagtgctgctaaaaagaataacttaccttttaagttgacatgtgcaactactagacaagttgttaatgttgtaacaacaaagatagcacttaagggtggtaaaattgttaataattggttgaagcagttaattaaagtaacgctagtatttctatttgtagcggcgatattttatttaataacgccggtacatgtaatgtcgaaacatacggatttttcgtcggaaataataggttataaagcgatagatggtggtgtaactcgtgatatagcgtcgacggatacgtgttttgcgaataaacatgcggattttgatacgtggttttcgcaacgtggtggttcgtatacgaatgataaagcgtgtccgttaatagcggcggtaataacacgtgaagtaggttttgtagtaccgggtttaccgggtacgatattacgtacgacgaatggtgattttttacattttttaccgcgtgtattttcggcggtaggtaatatatgttatacgccgtcgaaactaatagaatatacggattttgcgacgtcggcgtgtgtattagcggcggaatgtacgatatttaaagatgcgtcgggtaaaccggtaccgtattgttatgatacgaatgtactagaaggttcggtagcgtatgaatcgttacgcccggatacacgttatgtactaatggatggttcgataatacaatttccgaatacgtatctagaaggttcggtacgtgtagtaacgacgtttgattcggaatattgtcgtcatggtacgtgtgaacgttcggaagcgggtgtatgtgtatcgacgtcggggcgttgggtactaaataatgattattatcgttcgttaccgggtgtattctgtggtgtagatgcggtaaatttactaacgaatatgtttacgccgctgatacaaccgataggtgcgttagatatatcggcgtcgatagtagcgggtggtatagtagcgatagtagtaacgtgtctagcgtattattttatgcgttttcgtcgtgcgtttggtgaatattcgcatgtagtagcgtttaatacgttactatttctaatgtcttttacagtactatgtttaacgccggtatattcttttttaccgggtgtatattcggtaatatatttatatttaacgttttatctaacgaatgatgtatcgtttttagcgcatatacaatggatggtaatgtttacgccgttagtaccgttttggataacaatagcgtatataatatgtatatcgacgaaacatttttattggtttttttcgaattatctgaaacgtcgtgtagtatttaatggtgtatctttttcgacgtttgaagaagcggcgctatgtacatttttattaaataaagaaatgtatctaaaattacgttcggatgtactattaccgctaacgcaatataatcgttatttagcgctatataataaatataaatatttttcgggtgcgatggatacgacgtcgtatcgtgaagcggcgtgttgtcatctagcgaaagcgctaaatgatttttcgaattcgggttcggatgtactatatcaaccgccgcaaacgtcgataacgtcggcggtattacaatcgggttttcgtaaaatggcgtttccgtcgggtaaagtagaaggttgtatggtacaagtaacgtgtggtacgacgacgctaaatggtctatggctagatgatgtagtatattgtccgcgtcatgtaatatgtacgtcggaagatatgctaaatccgaattatgaagatttactaatacgtaaatcgaatcataattttttagtacaagcgggtaatgtacaactacgtgtaataggtcattcgatgcaaaattgtgtactaaaactaaaagtagatacggcgaatccgaaaacaccgaaatataaatttgtacgtatacaaccgggtcaaacgttttcggtattagcgtgttataatggttctccgtcgggtgtatatcaatgtgcgatgcgtccgaattttacgattaaaggttcgtttctaaatggttcgtgtggttcggtaggttttaatatagattatgattgtgtatcgttttgttatatgcatcatatggaattaccgacgggtgtacatgcgggtacggatttagaaggtaatttttatggtccgtttgtagatcgtcaaacagcgcaagcggcgggtacggatacgacgattacggtaaatgtattagcgtggttatatgcggcggtaataaatggtgatcgttggtttctaaatcgttttacgacgacgctaaatgattttaatctagtagcgatgaaatataattatgaaccgctgacacaagatcatgtagatatactaggtccgctatcggcgcaaacgggtatagcggtattagatatgtgtgcgtcgttaaaagaattactacaaaatggtatgaatggtcgtacgatattaggttcggcgttattagaagatgaatttacgccgtttgatgtagtacgtcaatgttcgggtgtaacgtttcaatcggcggtaaaacgtacgataaaaggtacgcatcattggttattactaacgatattaacgtcgctattagtattagtacaatcgacgcaatggtcgttatttttttttttatatgaaaatgcgtttttaccgtttgcgatgggtataatagcgatgtcggcgtttgcgatgatgtttgtaaaacataagcatgcatttctctgtttgtttttgttaccttctcttgccactgtagcttattttaatatggtctatatgcctgctagttgggtgatgcgtattatgacatggttggatatggttgatactagtttgtctggttttaagctaaaagactgtgttatgtatgcatcagctgtagtgttactaatccttatgacagcaagaactgtgtatgatgatggtgctaggagagtgtggacacttatgaatgtcttgacactcgtttataaagtttattatggtaatgctttagatcaagccatttccatgtgggctcttataatctctgttacttctaactactcaggtgtagttacaactgtcatgtttttggccagaggtattgtttttatgtgtgttgagtattgccctattttcttcataactggtaatacacttcagtgtataatgctagtttattgtttcttaggctatttttgtacttgttactttggcctcttttgtttactcaaccgctactttagactgactcttggtgtttatgattacttagtttctacacaggagtttagatatatgaattcacagggactactcccacccaagaatagcatagatgccttcaaactcaacattaaattgttgggtgttggtggcaaaccttgtatcaaagtagccactgtacagtctaaaatgtcagatgtaaagtgcacatcagtagtcttactctcagttttgcaacaactcagagtagaatcatcatctaaattgtgggctcaatgtgtccagttacacaatgacattctcttagctaaagatactactgaagcctttgaaaaaatggtttcactactttctgttttgctttccatgcagggtgctgtagacataaacaagctttgtgaagaaatgctggacaacagggcaaccttacaagctatagcctcagagtttagttcccttccatcatatgcagcttttgctactgctcaagaagcttatgagcaggctgttgctaatggtgattctgaagttgttcttaaaaagttgaagaagtctttgaatgtggctaaatctgaatttgaccgtgatgcagccatgcaacgtaagttggaaaagatggctgatcaagctatgacccaaatgtataaacaggctagatctgaggacaagagggcaaaagttactagtgctatgcagacaatgcttttcactatgcttagaaagttggataatgatgcactcaacaacattatcaacaatgcaagagatggttgtgttcccttgaacataatacctcttacaacagcagccaaactaatggttgtcataccagactataacacatataaaaatacgtgtgatggtacaacatttacttatgcatcagcattgtgggaaatccaacaggttgtagatgcagatagtaaaattgttcaacttagtgaaattagtatggacaattcacctaatttagcatggcctcttattgtaacagctttaagggccaattctgctgtcaaattacagaataatgagcttagtcctgttgcactacgacagatgtcttgtgctgccggtactacacaaactgcttgcactgatgacaatgcgttagcttactacaacacaacaaagggaggtaggtttgtacttgcactgttatccgatttacaggatttgaaatgggctagattccctaagagtgatggaactggtactatctatacagaactggaaccaccttgtaggtttgttacagacacacctaaaggtcctaaagtgaagtatttatactttattaaaggattaaacaacctaaatagaggtatggtacttggtagtttagctgccacagtacgtctacaagctggtaatgcaacagaagtgcctgccaattcaactgtattatctttctgtgcttttgctgtagatgctgctaaagcttacaaagattatctagctagtgggggacaaccaatcactaattgtgttaagatgttgtgtacacacactggtactggtcaggcaataacagttacaccggaagccaatatggatcaagaatcctttggtggtgcatcgtgttgtctgtactgccgttgccacatagatcatccaaatcctaaaggattttgtgacttaaaaggtaagtatgtacaaatacctacaacttgtgctaatgaccctgtgggttttacacttaaaaacacagtctgtaccgtctgcggtatgtggaaaggttatggctgtagttgtgatcaactccgcgaacccatgcttcagtcagctgatgcacaatcgtttttaaacgggtttgcggtgtaagtgcagcccgtcttacaccgtgcggcacaggcactagtactgatgtcgtatacagggcttttgacatctacaatgataaagtagctggttttgctaaattcctaaaaactaattgttgtcgcttccaagaaaaggacgaagatgacaatttaattgattcttactttgtagttaagagacacactttctctaactaccaacatgaagaaacaatttataatttacttaaggattgtccagctgttgctaaacatgacttctttaagtttagaatagacggtgacatggtaccacatatatcacgtcaacgtcttactaaatacacaatggcagacctcgtctatgctttaaggcattttgatgaaggtaattgtgacacattaaaagaaatacttgtcacatacaattgttgtgatgatgattatttcaataaaaaggactggtatgattttgtagaaaacccagatatattacgcgtatacgccaacttaggtgaacgtgtacgccaagctttgttaaaaacagtacaattctgtgatgccatgcgaaatgctggtattgttggtgtactgacattagataatcaagatctcaatggtaactggtatgatttcggtgatttcatacaaaccacgccaggtagtggagttcctgttgtagattcttattattcattgttaatgcctatattaaccttgaccagggctttaactgcagagtcacatgttgacactgacttaacaaagccttacattaagtgggatttgttaaaatatgacttcacggaagagaggttaaaactctttgaccgttattttaaatattgggatcagacataccacccaaattgtgttaactgtttggatgacagatgcattctgcattgtgcaaactttaatgttttattctctacagtgttcccacctacaagttttggaccactagtgagaaaaatatttgttgatggtgttccatttgtagtttcaactggataccacttcagagagctaggtgttgtacataatcaggatgtaaacttacatagctctagacttagttttaaggaattacttgtgtatgctgctgaccctgctatgcacgctgcttctggtaatctattactagataaacgcactacgtgcttttcagtagctgcacttactaacaatgttgcttttcaaactgtcaaacccggtaattttaacaaagacttctatgactttgctgtgtctaagggtttctttaaggaaggaagttctgttgaattaaaacacttcttctttgctcaggatggtaatgctgctatcagcgattatgactactatcgttataatctaccaacaatgtgtgatatcagacaactactatttgtagttgaagttgttgataagtactttgattgttacgatggtggctgtattaatgctaaccaagtcatcgtcaacaacctagacaaatcagctggttttccatttaataaatggggtaaggctagactttattatgattcaatgagttatgaggatcaagatgcacttttcgcatatacaaaacgtaatgtcatccctactataactcaaatgaatcttaagtatgccattagtgcaaagaatagagctcgcaccgtagctggtgtctctatctgtagtactatgaccaatagacagtttcatcaaaaattattgaaatcaatagccgccactagaggagctactgtagtaattggaacaagcaaattctatggtggttggcacaacatgttaaaaactgtttatagtgatgtagaaaaccctcaccttatgggttgggattatcctaaatgtgatagagccatgcctaacatgcttagaattatggcctcacttgttcttgctcgcaaacatacaacgtgttgtagcttgtcacaccgtttctatagattagctaatgagtgtgctcaagtattgagtgaaatggtcatgtgtggcggttcactatatgttaaaccaggtggaacctcatcaggagatgccacaactgcttatgctaatagtgtttttaacatttgtcaagctgtcacggccaatgttaatgcacttttatctactgatggtaacaaaattgccgataagtatgtccgcaatttacaacacagactttatgagtgtctctatagaaatagagatgttgacacagactttgtgaatgagttttacgcatatttgcgtaaacatttctcaatgatgatactctctgacgatgctgttgtgtgtttcaatagcacttatgcatctcaaggtctagtggctagcataaagaactttaagtcagttctttattatcaaaacaatgtttttatgtctgaagcaaaatgttggactgagactgaccttactaaaggacctcatgaattttgctctcaacatacaatgctagttaaacagggtgatgattatgtgtaccttccttacccagatccatcaagaatcctaggggccggctgttttgtagatgatatcgtaaaaacagatggtacacttatgattgaacggttcgtgtctttagctatagatgcttacccacttactaaacatcctaatcaggagtatgctgatgtctttcatttgtacttacaatacataagaaagctacatgatgagttaacaggacacatgttagacatgtattctgttatgcttactaatgataacacttcaaggtattgggaacctgagttttatgaggctatgtacacaccgcatacagtcttacaggctgttggggcttgtgttctttgcaattcacagacttcattaagatgtggtgcttgcatacgtagaccattcttatgttgtaaatgctgttacgaccatgtcatatcaacatcacataaattagtcttgtctgttaatccgtatgtttgcaatgctccaggttgtgatgtcacagatgtgactcaactttacttaggaggtatgagctattattgtaaatcacataaaccacccattagttttccattgtgtgctaatggacaagtttttggtttatataaaaatacatgtgttggtagcgataatgttactgactttaatgcaattgcaacatgtgactggacaaatgctggtgattacattttagctaacacctgtactgaaagactcaagctttttgcagcagaaacgctcaaagctactgaggagacatttaaactgtcttatggtattgctactgtacgtgaagtgctgtctgacagagaattacatctttcatgggaagttggtaaacctagaccaccacttaaccgaaattatgtctttactggttatcgtgtaactaaaaacagtaaagtacaaataggagagtacacctttgaaaaaggtgactatggtgatgctgttgtttaccgaggtacaacaacttacaaattaaatgttggtgattattttgtgctgacatcacatacagtaatgccattaagtgcacctacactagtgccacaagagcactatgttagaattactggcttatacccaacactcaatatctcagatgagttttctagcaatgttgcaaattatcaaaaggttggtatgcaaaagtattctacactccagggaccacctggtactggtaagagtcattttgctattggcctagctctctactacccttctgctcgcatagtgtatacagcttgctctcatgccgctgttgatgcactatgtgagaaggcattaaaatatttgcctatagataaatgtagtagaattatacctgcacgtgctcgtgtagagtgttttgataaattcaaagtgaattcaacattagaacagtatgtcttttgtactgtaaatgcattgcctgagacgacagcagatatagttgtctttgatgaaatttcaatggccacaaattatgatttgagtgttgtcaatgccagattacgtgctaagcactatgtgtacattggcgaccctgctcaattacctgcaccacgcacattgctaactaagggcacactagaaccagaatatttcaattcagtgtgtagacttatgaaaactataggtccagacatgttcctcggaacttgtcggcgttgtcctgctgaaattgttgacactgtgagtgctttggtttatgataataagcttaaagcacataaagacaaatcagctcaatgctttaaaatgttttataagggtgttatcacgcatgatgtttcatctgcaattaacaggccacaaataggcgtggtaagagaattccttacacgtaaccctgcttggagaaaagctgtctttatttcaccttataattcacagaatgctgtagcctcaaagattttgggactaccaactcaaactgttgattcatcacagggctcagaatatgactatgtcatattcactcaaaccactgaaacagctcactcttgtaatgtaaacagatttaatgttgctattaccagagcaaaagtaggcatactttgcataatgtctgatagagacctttatgacaagttgcaatttacaagtcttgaaattccacgtaggaatgtggcaactttacaagctgaaaatgtaacaggactctttaaagattgtagtaaggtaatcactgggttacatcctacacaggcacctacacacctcagtgttgacactaaattcaaaactgaaggtttatgtgttgacatacctggcatacctaaggacatgacctatagaagactcatctctatgatgggttttaaaatgaattatcaagttaatggttaccctaacatgtttatcacccgcgaagaagctataagacatgtacgtgcatggattggcttcgatgtcgaggggtgtcatgctactagagaagctgttggtaccaatttacctttacagctaggtttttctacaggtgttaacctagttgctgtacctacaggttatgttgatacacctaataatacagatttttccagagttagtgctaaaccaccgcctggagatcaatttaaacacctcataccacttatgtacaaaggacttccttggaatgtagtgcgtataaagattgtacaaatgttaagtgacacacttaaaaatctctctgacagagtcgtatttgtcttatgggcacatggctttgagttgacatctatgaagtattttgtgaaaataggacctgagcgcacctgttgtctatgtgatagacgtgccacatgcttttccactgcttcagacacttatgcctgttggcatcattctattggatttgattacgtctataatccgtttatgattgatgttcaacaatggggttttacaggtaacctacaaagcaaccatgatctgtattgtcaagtccatggtaatgcacatgtagctagttgtgatgcaatcatgactaggtgtctagctgtccacgagtgctttgttaagcgtgttgactggactattgaatatcctataattggtgatgaactgaagattaatgcggcttgtagaaaggttcaacacatggttgttaaagctgcattattagcagacaaattcccagttcttcacgacattggtaaccctaaagctattaagtgtgtacctcaagctgatgtagaatggaagttctatgatgcacagccttgtagtgacaaagcttataaaatagaagaattattctattcttatgccacacattctgacaaattcacagatggtgtatgcctattttggaattgcaatgtcgatagatatcctgctaattccattgtttgtagatttgacactagagtgctatctaaccttaacttgcctggttgtgatggtggcagtttgtatgtaaataaacatgcattccacacaccagcttttgataaaagtgcttttgttaatttaaaacaattaccatttttctattactctgacagtccatgtgagtctcatggaaaacaagtagtgtcagatatagattatgtaccactaaagtctgctacgtgtataacacgttgcaatttaggtggtgctgtctgtagacatcatgctaatgagtacagattgtatctcgatgcttataacatgatgatctcagctggctttagcttgtgggtttacaaacaatttgatacttataacctctggaacacttttacaagacttcagagtttagaaaatgtggcttttaatgttgtaaataagggacactttgatggacaacagggtgaagtaccagtttctatcattaataacactgtttacacaaaagttgatggtgttgatgtagaattgtttgaaaataaaacaacattacctgttaatgtagcatttgagctttgggctaagcgcaacattaaaccagtaccagaggtgaaaatactcaataatttgggtgtggacattgctgctaatactgtgatctgggactacaaaagagatgctccagcacatatatctactattggtgtttgttctatgactgacatagccaagaaaccaactgaaacgatttgtgcaccactcactgtcttttttgatggtagagttgatggtcaagtagacttatttagaaatgcccgtaatggtgttcttattacagaaggtagtgttaaaggtttacaaccatctgtaggtcccaaacaagctagtcttaatggagtcacattaattggagaagccgtaaaaacacagttcaattattataagaaagttgatggtgttgtccaacaattacctgaaacttactttactcagagtagaaatttacaagaatttaaacccaggagtcaaatggaaattgatttcttagaattagctatggatgaattcattgaacggtataaattagaaggctatgccttcgaacatatcgtttatggagattttagtcatagtcagttaggtggtttacatctactgattggactagctaaacgttttaaggaatcaccttttgaattagaagattttattcctatggacagtacagttaaaaactatttcataacagatgcgcaaacaggttcatctaagtgtgtgtgttctgttattgatttattacttgatgattttgttgaaataataaaatcccaagatttatctgtagtttctaaggttgtcaaagtgactattgactatacagaaatttcatttatgctttggtgtaaagatggccatgtagaaacattttacccaaaattacaatctagtcaagcgtggcaaccgggtgttgctatgcctaatctttacaaaatgcaaagaatgctattagaaaagtgtgaccttcaaaattatggtgatagtgcaacattacctaaaggcataatgatgaatgtcgcaaaatatactcaactgtgtcaatatttaaacacattaacattagctgtaccctataatatgagagttatacattttggtgctggttctgataaaggagttgcaccaggtacagctgttttaagacagtggttgcctacgggtacgctgcttgtcgattcagatcttaatgactttgtctctgatgcagattcaactttgattggtgattgtgcaactgtacatacagctaataaatgggatctcattattagtgatatgtacgaccctaagactaaaaatgttacaaaagaaaatgactctaaagagggttttttcacttacatttgtgggtttatacaacaaaagctagctcttggaggttccgtggctataaagataacagaacattcttggaatgctgatctttataagctcatgggacacttcgcatggtggacagcctttgttactaatgtgaatgcgtcatcatctgaagcatttttaattggatgtaattatcttggcaaaccacgcgaacaaatagatggttatgtcatgcatgcaaattacatattttggaggaatacaaatccaattcagttgtcttcctattctttatttgacatgagtaaatttccccttaaattaaggggtactgctgttatgtctttaaaagaaggtcaaatcaatgatatgattttatctcttcttagtaaaggtagacttataattagagaaaacaacagagttgttatttctagtgatgttcttgttaacaactaaacgaacaatgtttgtttttcttgttttattgccactagtctctagtcagtgtgttaatcttacaaccagaactcaattaccccctgcatacactaattctttcacacgtggtgtttattaccctgacaaagttttcagatcctcagttttacattcaactcaggacttgttcttacctttcttttccaatgttacttggttccatgctatacatgtctctgggaccaatggtactaagaggtttgataaccctgtcctaccatttaatgatggtgtttattttgcttccactgagaagtctaacataataagaggctggatttttggtactactttagattcgaagacccagtccctacttattgttaataacgctactaatgttgttattaaagtctgtgaatttcaattttgtaatgatccatttttgggtgtttattaccacaaaaacaacaaaagttggatggaaagtgagttcagagtttattctagtgcgaataattgcacttttgaatatgtctctcagccttttcttatggaccttgaaggaaaacagggtaatttcaaaaatcttagggaatttgtgtttaagaatattgatggttattttaaaatatattctaagcacacgcctattaatttagtgcgtgatctcccccagggtttttcggctttagaaccattggtagatttgccaataggtattaacatcactaggtttcaaactttacttgctttacatagaagttatttgactcctggtgattcttcttcaggttggacagctggtgctgcagcttattatgtgggttatcttcaacctaggacttttctattaaaatataatgaaaatggaaccattacagatgctgtagactgtgcacttgaccctctctcagaaacaaagtgtacgttgaaatccttcactgtagaaaaaggaatctatcaaacttctaactttagagtccaaccaacagaatctattgttagatttcctaatattacaaacttgtgcccttttggtgaagtttttaacgccaccagatttgcatctgtttatgcttggaacaggaagagaatcagcaactgtgttgctgattattctgtcctatataattccgcatcattttccacttttaagtgttatggagtgtctcctactaaattaaatgatctctgctttactaatgtctatgcagattcatttgtaattagaggtgatgaagtcagacaaatcgctccagggcaaactggaaagattgctgattataattataaattaccagatgattttacaggctgcgttatagcttggaattctaacaatcttgattctaaggttggtggtaattataattacctgtatagattgtttaggaagtctaatctcaaaccttttgagagagatatttcaactgaaatctatcaggccggtagcacaccttgtaatggtgttgaaggttttaattgttactttcctttacaatcatatggtttccaacccactaatggtgttggttaccaaccatacagagtagtagtactttcttttgaacttctacatgcaccagcaactgtttgtggacctaaaaagtctactaatttggttaaaaacaaatgtgtcaatttcaacttcaatggtttaacaggcacaggtgttcttactgagtctaacaaaaagtttctgcctttccaacaatttggcagagacattgctgacactactgatgctgtccgtgatccacagacacttgagattcttgacattacaccatgttcttttggtggtgtcagtgttataacaccaggaacaaatacttctaaccaggttgctgttctttatcaggatgttaactgcacagaagtccctgttgctattcatgcagatcaacttactcctacttggcgtgtttattctacaggttctaatgtttttcaaacacgtgcaggctgtttaataggggctgaacatgtcaacaactcatatgagtgtgacatacccattggtgcaggtatatgcgctagttatcagactcagactaattctcctcggcgggcacgtagtgtagctagtcaatccatcattgcctacactatgtcacttggtgcagaaaattcagttgcttactctaataactctattgccatacccacaaattttactattagtgttaccacagaaattctaccagtgtctatgaccaagacatcagtagattgtacaatgtacatttgtggtgattcaactgaatgcagcaatcttttgttgcaatatggcagtttttgtacacaattaaaccgtgctttaactggaatagctgttgaacaagacaaaaacacccaagaagtttttgcacaagtcaaacaaatttacaaaacaccaccaattaaagattttggtggttttaatttttcacaaatattaccagatccatcaaaaccaagcaagaggtcatttattgaagatctacttttcaacaaagtgacacttgcagatgctggcttcatcaaacaatatggtgattgccttggtgatattgctgctagagacctcatttgtgcacaaaagtttaacggccttactgttttgccacctttgctcacagatgaaatgattgctcaatacacttctgcactgttagcgggtacaatcacttctggttggacctttggtgcaggtgctgcattacaaataccatttgctatgcaaatggcttataggtttaatggtattggagttacacagaatgttctctatgagaaccaaaaattgattgccaaccaatttaatagtgctattggcaaaattcaagactcactttcttccacagcaagtgcacttggaaaacttcaagatgtggtcaaccaaaatgcacaagctttaaacacgcttgttaaacaacttagctccaattttggtgcaatttcaagtgttttaaatgatatcctttcacgtcttgacaaagttgaggctgaagtgcaaattgataggttgatcacaggcagacttcaaagtttgcagacatatgtgactcaacaattaattagagctgcagaaatcagagcttctgctaatcttgctgctactaaaatgtcagagtgtgtacttggacaatcaaaaagagttgatttttgtggaaagggctatcatcttatgtccttccctcagtcagcacctcatggtgtagtcttcttgcatgtgacttatgtccctgcacaagaaaagaacttcacaactgctcctgccatttgtcatgatggaaaagcacactttcctcgtgaaggtgtctttgtttcaaatggcacacactggtttgtaacacaaaggaatttttatgaaccacaaatcattactacagacaacacatttgtgtctggtaactgtgatgttgtaataggaattgtcaacaacacagtttatgatcctttgcaacctgaattagactcattcaaggaggagttagataaatattttaagaatcatacatcaccagatgttgatttaggtgacatctctggcattaatgcttcagttgtaaacattcaaaaagaaattgaccgcctcaatgaggttgccaagaatttaaatgaatctctcatcgatctccaagaacttggaaagtatgagcagtatataaaatggccatggtacatttggctaggttttatagctggcttgattgccatagtaatggtgacaattatgctttgctgtatgaccagttgctgtagttgtctcaagggctgttgttcttgtggatcctgctgcaaatttgatgaagacgactctgagccagtgctcaaaggagtcaaattacattacacataaacgaacttatggatttgtttatgagaatcttcacaattggaactgtaactttgaagcaaggtgaaatcaaggatgctactccttcagattttgttcgcgctactgcaacgataccgatacaagcctcactccctttcggatggcttattgttggcgttgcacttcttgctgtttttcagagcgcttccaaaatcataaccctcaaaaagagatggcaactagcactctccaagggtgttcactttgtttgcaacttgctgttgttgtttgtaacagtttactcacaccttttgctcgttgctgctggccttgaagccccttttctctatctttatgctttagtctacttcttgcagagtataaactttgtaagaataataatgaggctttggctttgctggaaatgccgttccaaaaacccattactttatgatgccaactattttctttgctggcatactaattgttacgactattgtataccttacaatagtgtaacttcttcaattgtcattacttcaggtgatggcacaacaagtcctatttctgaacatgactaccagattggtggttatactgaaaaatgggaatctggagtaaaagactgtgttgtattacacagttacttcacttcagactattaccagctgtactcaactcaattgagtacagacactggtgttgaacatgttaccttcttcatctacaataaaattgttgatgagcctgaagaacatgtccaaattcacacaatcgacggttcatccggagttgttaatccagtaatggaaccaatttatgatgaaccgacgacgactactagcgtgcctttgtaagcacaagctgatgagtacgaacttatgtactcattcgtttcggaagagacaggtacgttaatagttaatagcgtacttctttttcttgctttcgtggtattcttgctagttacactagccatccttactgcgcttcgattgtgtgcgtactgctgcaatattgttaacgtgagtcttgtaaaaccttctttttacgtttactctcgtgttaaaaatctgaattcttctagagttcctgatcttctggtctaaacgaactaaatattatattagtttttctgtttggaactttaattttagccatggcagattccaacggtactattaccgttgaagagcttaaaaagctccttgaacaatggaacctagtaataggtttcctattccttacatggatttgtcttctacaatttgcctatgccaacaggaataggtttttgtatataattaagttaattttcctctggctgttatggccagtaactttagcttgttttgtgcttgctgctgtttacagaataaattggatcaccggtggaattgctatcgcaatggcttgtcttgtaggcttgatgtggctcagctacttcattgcttctttcagactgtttgcgcgtacgcgatccatgtggtcattcaatccagaaactaacattcttctcaacgtgccactccatggcactattctgaccagaccgcttctagaaagtgaactcgtaatcggagctgtgatccttcgtggacatcttcgtattgctggacaccatctaggacgctgtgacatcaaggacctgcctaaagaaatcactgttgctacatcacgaacgctttcttattacaaattgggagcttcgcagcgtgtagcaggtgactcaggttttgctgcatacagtcgctacaggattggcaactataaattaaacacagaccattccagtagcagtgacaatattgctttgcttgtacagtaagtgacaacagatgtttcatctcgttgactttcaggttactatagcagagatattactaattattatgaggacttttaaagtttccatttggaatcttgattacatcataaacctcataattaaaaatttatctaagtcactaactgagaataaatattctcaattagatgaagagcaaccaatggagattgattaaacgaacatgaaaattattcttttcttggcactgataacactcgctacttgtgagctttatcactaccaagagtgtgttagaggtacaacagtacttttaaaagaaccttgctcttctggaacatacgagggcaattcaccatttcatcctctagctgataacaaatttgcactgacttgctttagcactcaatttgcttttgcttgtcctgacggcgtaaaacacgtctatcagttacgtgccagatcagtttcacctaaactgttcatcagacaagaggaagttcaagaactttactctccaatttttcttattgttgcggcaatagtgtttataacactttgcttcacactcaaaagaaagacagaatgattgaactttcattaattgacttctatttgtgctttttagcctttctgctattccttgttttaattatgcttattatcttttggttctcacttgaactgcaagatcataatgaaacttgtcacgcctaaacgaacatgaaatttcttgttttcttaggaatcatcacaactgtagctgcatttcaccaagaatgtagtttacagtcatgtactcaacatcaaccatatgtagttgatgacccgtgtcctattcacttctattctaaatggtatattagagtaggagctagaaaatcagcacctttaattgaattgtgcgtggatgaggctggttctaaatcacccattcagtacatcgatatcggtaattatacagtttcctgtttaccttttacaattaattgccaggaacctaaattgggtagtcttgtagtgcgttgttcgttctatgaagactttttagagtatcatgacgttcgtgttgttttagatttcatctaaacgaacaaactaaaatgtctgataatggaccccaaaatcagcgaaatgcaccccgcattacgtttggtggaccctcagattcaactggcagtaaccagaatggagaacgcagtggggcgcgatcaaaacaacgtcggccccaaggtttacccaataatactgcgtcttggttcaccgctctcactcaacatggcaaggaagaccttaaattccctcgaggacaaggcgttccaattaacaccaatagcagtccagatgaccaaattggctactaccgaagagctaccagacgaattcgtggtggtgacggtaaaatgaaagatctcagtccaagatggtatttctactacctaggaactgggccagaagctggacttccctatggtgctaacaaagacggcatcatatgggttgcaactgagggagccttgaatacaccaaaagatcacattggcacccgcaatcctgctaacaatgctgcaatcgtgctacaacttcctcaaggaacaacattgccaaaaggcttctacgcagaagggagcagaggcggcagtcaagcctcttctcgttcctcatcacgtagtcgcaacagttcaagaaattcaactccaggcagcagtaggggaacttctcctgctagaatggctggcaatggcggtgatgctgctcttgctttgctgctgcttgacagattgaaccagcttgagagcaaaatgtctggtaaaggccaacaacaacaaggccaaactgtcactaagaaatctgctgctgaggcttctaagaagcctcggcaaaaacgtactgccactaaagcatacaatgtaacacaagctttcggcagacgtggtccagaacaaacccaaggaaattttggggaccaggaactaatcagacaaggaactgattacaaacattggccgcaaattgcacaatttgcccccagcgcttcagcgttcttcggaatgtcgcgcattggcatggaagtcacaccttcgggaacgtggttgacctacacaggtgccatcaaattggatgacaaagatccaaatttcaaagatcaagtcattttgctgaataagcatattgacgcatacaaaacattcccaccaacagagcctaaaaaggacaaaaagaagaaggctgatgaaactcaagccttaccgcagagacagaagaaacagcaaactgtgactcttcttcctgctgcagatttggatgatttctccaaacaattgcaacaatccatgagcagtgctgactcaactcaggcctaaactcatgcagaccacacaaggcagatgggctatataaacgttttcgcttttccgtttacgatatatagtctactcttgtgcagaatgaattctcgtaactacatagcacaagtagatgtagttaactttaatctcacatagcaatctttaatcagtgtgtaacattagggaggacttgaaagagccaccacattttcaccgaggccacgcggagtacgatcgagtgtacagtgaacaatgctagggagagctgcctatatggaagagccctaatgtgtaaaattaattttagtagtgctatccccatgtgattttaatagcttcttaggagaatgacaaaaaaaaaaaaaaaaaaaaaaaaaaaaaaaaaaaaaaaaaaaaaaaaaaaaaaaaaaagggtcggcatggcatctccacctcctcgcggtccgacctgggcatccgaaggaggacgcacgtccactcggatggctaagggagcagcacactggcggccgttactagggccgcgcccttcccaacagttgcgcagcctgaatggcgaatggagatccaatttttaagtgtataatgtgttaaactactgattctaattgtttgtgtattttagattcacagtcccaaggctcatttcaggcccctcagtcctcacagtctgttcatgatcataatcagccataccacatttgtagaggttttacttgctttaaaaaacctcccacacctccccctgaacctgaaacataaaatgaatgcaattgttgttgttaacttgtttattgcagcttataatggttacaaataaagcaatagcatcacaaatttcacaaataaagcatttttttcactgcattctagttgtggtttgtccaaactcatcaatgtatcttaaagcttgagtattctatagtctcacctaaatagcttggcgtaatcatggtcatagctgtttcctgtgtgaaattgttatccgctcacaattccacacaacatacgagccggaagcataaagtgtaaagcctggggtgcctaatgagtgagctaactcacattaattgcgttgcgctcactgcccgctttccagtcgggaaacctgtcgtgccagctgcattaatgaatcggccaacgcgaaccccttgcggccgcccgggccgtcgaccaattctcatgtttgacagcttatcatcgaatttctgccattcatccgcttattatcacttattcaggcgtagcaaccaggcgtttaagggcaccaataactgccttaaaaaaattacgccccgccctgccactcatcgcagtactgttgtaattcattaagcattctgccgacatggaagccatcacaaacggcatgatgaacctgaatcgccagcggcatcagcaccttgtcgccttgcgtataatatttgcccatggtgaaaacgggggcgaagaagttgtccatattggccacgtttaaatcaaaactggtgaaactcacccagggattggctgagacgaaaaacatattctcaataaaccctttagggaaataggccaggttttcaccgtaacacgccacatcttgcgaatatatgtgtagaaactgccggaaatcgtcgtggtattcactccagagcgatgaaaacgtttcagtttgctcatggaaaacggtgtaacaagggtgaacactatcccatatcaccagctcaccgtctttcattgccatacgaaattccggatgagcattcatcaggcgggcaagaatgtgaataaaggccggataaaacttgtgcttatttttctttacggtctttaaaaaggccgtaatatccagctgaacggtctggttataggtacattgagcaactgactgaaatgcctcaaaatgttctttacgatgccattgggatatatcaacggtggtatatccagtgatttttttctccattttagcttccttagctcctgaaaatctcgataactcaaaaaatacgcccggtagtgatcttatttcattatggtgaaagttggaacctcttacgtgccgatcaacgtctcattttcgccaaaagttggcccagggcttcccggtatcaacagggacaccaggatttatttattctgcgaagtgatcttccgtcacaggtatttattcgcgataagctcatggagcggcgtaaccgtcgcacaggaaggacagagaaagcgcggatctgggaagtgacggacagaacggtcaggacctggattggggaggcggttgccgccgctgctgctgacggtgtgacgttctctgttccggtcacaccacatacgttccgccattcctatgcgatgcacatgctgtatgccggtataccgctgaaagttctgcaaagcctgatgggacataagtccatcagttcaacggaagtctacacgaaggtttttgcgctggatgtggctgcccggcaccgggtgcagtttgcgatgccggagtctgatgcggttgcgatgctgaaacaattatcctgagaataaatgccttggcctttatatggaaatgtggaactgagtggatatgctgtttttgtctgttaaacagagaagctggctgttatccactgagaagcgaacgaaacagtcgggaaaatctcccattatcgtagagatccgcattattaatctcaggagcctgtgtagcgtttataggaagtagtgttctgtcatgatgcctgcaagcggtaacgaaaacgatttgaatatgccttcaggaacaatagaaatcttcgtgcggtgttacgttgaagtggagcggattatgtcagcaatggacagaacaacctaatgaacacagaaccatgatgtggtctgtccttttacagccagtagtgctcgccgcagtcgagcgacagggcgaagccctcggctggttgccctcgccgctgggctggcggccgtctatggccctgcaaacgcgccagaaacgccgtcgaagccgtgtgcgagacaccgcggccggccgccggcgttgtggatacctcgcggaaaacttggccctcactgacagatgaggggcggacgttgacacttgaggggccgactcacccggcgcggcgttgacagatgaggggcaggctcgatttcggccggcgacgtggagctggccagcctcgcaaatcggcgaaaacgcctgattttacgcgagtttcccacagatgatgtggacaagcctggggataagtgccctgcggtattgacacttgaggggcgcgactactgacagatgaggggcgcgatccttgacacttgaggggcagagtgctgacagatgaggggcgcacctattgacatttgaggggctgtccacaggcagaaaatccagcatttgcaagggtttccgcccgtttttcggccaccgctaacctgtcttttaacctgcttttaaaccaatatttataaaccttgtttttaaccagggctgcgccctgtgcgcgtgaccgcgcacgccgaaggggggtgcccccccttctcgaaccctcccggtcgagtgagcgaggaagcaccagggaacagcacttatatattctgcttacacacgatgcctgaaaaaacttcccttggggttatccacttatccacggggatatttttataattattttttttatagtttttagatcttcttttttagagcgccttgtaggcctttatccatgctggttctagagaaggtgttgtgacaaattgccctttcagtgtgacaaatcaccctcaaatgacagtcctgtctgtgacaaattgcccttaaccctgtgacaaattgccctcagaagaagctgttttttcacaaagttatccctgcttattgactcttttttatttagtgtgacaatctaaaaacttgtcacacttcacatggatctgtcatggcggaaacagcggttatcaatcacaagaaacgtaaaaatagcccgcgaatcgtccagtcaaacgacctcactgaggcggcatatagtctctcccgggatcaaaaacgtatgctgtatctgttcgttgaccagatcagaaaatctgatggcaccctacaggaacatgacggtatctgcgagatccatgttgctaaatatgctgaaatattcggattgacctctgcggaagccagtaaggatatacggcaggcattgaagagtttcgcggggaaggaagtggttttttatcgccctgaagaggatgccggcgatgaaaaaggctatgaatcttttccttggtttatcaaacgtgcgcacagtccatccagagggctttacagtgtacatatcaacccatatctcattcccttctttatcgggttacagaaccggtttacgcagtttcggcttagtgaaacaaaagaaatcaccaatccgtatgccatgcgtttatacgaatccctgtgtcagtatcgtaagccggatggctcaggcatcgtctctctgaaaatcgactggatcatagagcgttaccagctgcctcaaagttaccagcgtatgcctgacttccgccgccgcttcctgcaggtctgtgttaatgagatcaacagcagaactccaatgcgcctctcatacattgagaaaaagaaaggccgccagacgactcatatcgtattttccttccgcgatatcacttccatgacgacaggatagtctgagggttatctgtcacagatttgagggtggttcgtcacatttgttctgacctactgagggtaatttgtcacagttttgctgtttccttcagcctgcatggattttctcatactttttgaactgtaatttttaaggaagccaaatttgagggcagtttgtcacagttgatttccttctctttcccttcgtcatgtgacctgatatcgggggttagttcgtcatcattgatgagggttgattatcacagtttattactctgaattggctatccgcgtgtgtacctctacctggagtttttcccacggtggatatttcttcttgcgctgagcgtaagagctatctgacagaacagttcttctttgcttcctcgccagttcgctcgctatgctcggttacacggctgcggcg

SEQ ID NO: 30 - DNA, 35283 bp, Artificial Sequence
  Clone pCCI-4K-SARS-CoV-2-WWWWD. Based on SARS-CoV-2.
gatgtgctgcaaggcgattaagttgggtaacgccagggttttcccagtcacgacgttgtaaaacgacggccagtgaattgtaatacgactcactatagggcgaattctagttattaatagtaatcaattacggggtcattagttcatagcccatatatggagttccgcgttacataacttacggtaaatggcccgcctggctgaccgcccaacgacccccgcccattgacgtcaataatgacgtatgttcccatagtaacgccaatagggactttccattgacgtcaatgggtggagtatttacggtaaactgcccacttggcagtacatcaagtgtatcatatgccaagtacgccccctattgacgtcaatgacggtaaatggcccgcctggcattatgcccagtacatgaccttatgggactttcctacttggcagtacatctacgtattagtcatcgctattaccatggtgatgcggttttggcagtacatcaatgggcgtggatagcggtttgactcacggggatttccaagtctccaccccattgacgtcaatgggagtttgttttggcaccaaaatcaacgggactttccaaaatgtcgtaacaactccgccccattgacgcaaatgggcggtaggcgtgtacggtgggaggtctatataagcagagctggtttagtgaaccgtattaaaggtttataccttcccaggtaacaaaccaaccaactttcgatctcttgtagatctgttctctaaacgaactttaaaatctgtgtggctgtcactcggctgcatgcttagtgcactcacgcagtataattaataactaattactgtcgttgacaggacacgagtaactcgtctatcttctgcaggctgcttacggtttcgtccgtgttgcagccgatcatcagcacatctaggtttcgtccgggtgtgaccgaaaggtaagatggagagccttgtccctggtttcaacgagaaaacacacgtccaactcagtttgcctgttttacaggttcgcgacgtgctcgtacgtggctttggagactccgtggaggaggtcttatcagaggcacgtcaacatcttaaagatggcacttgtggcttagtagaagttgaaaaaggcgttttgcctcaacttgaacagccctatgtgttcatcaaacgttcggatgctcgaactgcacctcatggtcatgttatggttgagctggtagcagaactcgaaggcattcagtacggtcgtagtggtgagacacttggtgtccttgtccctcatgtgggcgaaataccagtggcttaccgcaaggttcttcttcgtaagaacggtaataaaggagctggtggccatagttacggcgccgatctaaagtcatttgacttaggcgacgagcttggcactgatccttatgaagattttcaagaaaactggaacactaaacatagcagtggtgttacccgtgaactcatgcgtgagcttaacggaggggcatacactcgctatgtcgataacaacttctgtggccctgatggctaccctcttgagtgcattaaagaccttctagcacgtgctggtaaagcttcatgcactttgtccgaacaactggactttattgacactaagaggggtgtatactgctgccgtgaacatgagcatgaaattgcttggtacacggaacgttctgaaaagagctatgaattgcagacaccttttgaaattaaattggcaaagaaatttgacaccttcaatggggaatgtccaaattttgtatttcccttaaattccataatcaagactattcaaccaagggttgaaaagaaaaagcttgatggctttatgggtagaattcgatctgtctatccagttgcgtcaccaaatgaatgcaaccaaatgtgcctttcaactctcatgaagtgtgatcattgtggtgaaacttcatggcagacgggcgattttgttaaagccacttgcgaattttgtggcactgagaatttgactaaagaaggtgccactacttgtggttacttaccccaaaatgctgttgttaaaatttattgtccagcatgtcacaattcagaagtaggacctgagcatagtcttgccgaataccataatgaatctggcttgaaaaccattcttcgtaagggtggtcgcactattgcctttggaggctgtgtgttctcttatgttggttgccataacaagtgtgcctattgggtcccacgtgctagcgctaacataggttgtaaccatacaggtgttgttggagaaggttccgaaggtcttaatgacaaccttcttgaaatactccaaaaagagaaagtcaacatcaatattgttggtgactttaaacttaatgaagagatcgccattattttggcatctttttctgcttccacaagtgcttttgtggaaactgtgaaaggtttggattataaagcattcaaacaaattgttgaatcctgtggtaattttaaagttacaaaaggaaaagctaaaaaaggtgcctggaatattggtgaacagaaatcaatactgagtcctctttatgcatttgcatcagaggctgctcgtgttgtacgatcaattttctcccgcactcttgaaactgctcaaaattctgtgcgtgttttacagaaggccgctataacaatactagatggaatttcacagtattcactgagactcattgatgctatgatgttcacatctgatttggctactaacaatctagttgtaatggcctacattacaggtggtgttgttcagttgacttcgcagtggctaactaacatctttggcactgtttatgaaaaactcaaacccgtccttgattggcttgaagagaagtttaaggaaggtgtagagtttcttagagacggttgggaaattgttaaatttatctcaacctgtgcttgtgaaattgtcggtggacaaattgtcacctgtgcaaaggaaattaaggagagtgttcagacattctttaagcttgtaaataaatttttggctttgtgtgctgactctatcattattggtggagctaaacttaaagccttgaatttaggtgaaacatttgtcacgcactcaaagggattgtacagaaagtgtgttaaatccagagaagaaactggcctactcatgcctctaaaagccccaaaagaaattatcttcttagagggagaaacacttcccacagaagtgttaacagaggaagttgtcttgaaaactggtgatttacaaccattagaacaacctactagtgaagctgttgaagctccattggttggtacaccagtttgtattaacgggcttatgttgctcgaaatcaaagacacagaaaagtactgtgcccttgcacctaatatgatggtaacaaacaataccttcacactcaaaggcggtgcaccaacaaaggttacttttggtgatgacactgtgatagaagtgcaaggttacaagagtgtgaatatcacttttgaacttgatgaaaggattgataaagtacttaatgagaagtgctctgcctatacagttgaactcggtacagaagtaaatgagttcgcctgtgttgtggcagatgctgtcataaaaactttgcaaccagtatctgaattacttacaccactgggcattgatttagatgagtggagtatggctacatactacttatttgatgagtctggtgagtttaaattggcttcacatatgtattgttctttctaccctccagatgaggatgaagaagaaggtgattgtgaagaagaagagtttgagccatcaactcaatatgagtatggtactgaagatgattaccaaggtaaacctttggaatttggtgccacttctgctgctcttcaacctgaagaagagcaagaagaagattggttagatgatgatagtcaacaaactgttggtcaacaagacggcagtgaggacaatcagacaactactattcaaacaattgttgaggttcaacctcaattagagatggaacttacaccagttgttcagactattgaagtgaatagttttagtggttatttaaaacttactgacaatgtatacattaaaaatgcagacattgtggaagaagctaaaaaggtaaaaccaacagtggttgttaatgcagccaatgtttaccttaaacatggaggaggtgttgcaggagccttaaataaggctactaacaatgccatgcaagttgaatctgatgattacatagctactaatggaccacttaaagtgggtggtagttgtgttttaagcggacacaatcttgctaaacactgtcttcatgttgtcggcccaaatgttaacaaaggtgaagacattcaacttcttaagagtgcttatgaaaattttaatcagcacgaagttctacttgcaccattattatcagctggtatttttggtgctgaccctatacattctttaagagtttgtgtagatactgttcgcacaaatgtctacttagctgtctttgataaaaatctctatgacaaacttgtttcaagctttttggaaatgaagagtgaaaagcaagttgaacaaaagatcgctgagattcctaaagaggaagttaagccatttataactgaaagtaaaccttcagttgaacagagaaaacaagatgataagaaaatcaaagcttgtgttgaagaagttacaacaactctggaagaaactaagttcctcacagaaaacttgttactttatattgacattaatggcaatcttcatccagattctgccactcttgttagtgacattgacatcactttcttaaagaaagatgctccatatatagtgggtgatgttgttcaagagggtgttttaactgctgtggttatacctactaaaaaggctggtggcactactgaaatgctagcgaaagctttgagaaaagtgccaacagacaattatataaccacttacccgggtcagggtttaaatggttacactgtagaggaggcaaagacagtgcttaaaaagtgtaaaagtgccttttacattctaccatctattatctctaatgagaagcaagaaattcttggaactgtttcttggaatttgcgagaaatgcttgcacatgcagaagaaacacgcaaattaatgcctgtctgtgtggaaactaaagccatagtttcaactatacagcgtaaatataagggtattaaaatacaagagggtgtggttgattatggtgctagattttacttttacaccagtaaaacaactgtagcgtcacttatcaacacacttaacgatctaaatgaaactcttgttacaatgccacttggctatgtaacacatggcttaaatttggaagaagctgctcggtatatgagatctctcaaagtgccagctacagtttctgtttcttcacctgatgctgttacagcgtataatggttatcttacttcttcttctaaaacacctgaagaacattttattgaaaccatctcacttgctggttcctataaagattggtcctattctggacaatctacacaactaggtatagaatttcttaagagaggtgataaaagtgtatattacactagtaatcctaccacattccacctagatggtgaagttatcacctttgacaatcttaagacacttctttctttgagagaagtgaggactattaaggtgtttacaacagtagacaacattaacctccacacgcaagttgtggacatgtcaatgacatatggacaacagtttggtccaacttatttggatggagctgatgttactaaaataaaacctcataattcacatgaaggtaaaacattttatgttttacctaatgatgacactctacgtgttgaggcttttgagtactaccacacaactgatcctagttttctgggtaggtacatgtcagcattaaatcacactaaaaagtggaaatacccacaagttaatggtttaacttctattaaatgggcagataacaactgttatcttgccactgcattgttaacactccaacaaatagagttgaagtttaatccacctgctctacaagatgcttattacagagcaagggctggtgaagctgctaacttttgtgcacttatcttagcctactgtaataagacagtaggtgagttaggtgatgttagagaaacaatgagttacttgtttcaacatgccaatttagattcttgcaaaagagtcttgaacgtggtgtgtaaaacttgtggacaacagcagacaacccttaagggtgtagaagctgttatgtacatgggcacactttcttatgaacaatttaagaaaggtgttcagataccttgtacgtgtggtaaacaagctacaaaatatctagtacaacaggagtcaccttttgttatgatgtcagcaccacctgctcagtatgaacttaagcatggtacatttacttgtgctagtgagtacactggtaattaccagtgtggtcactataaacatataacttctaaagaaactttgtattgcatagacggtgctttacttacaaagtcctcagaatacaaaggtcctattacggatgttttctacaaagaaaacagttacacaacaaccataaaaccagttacttataaattggatggtgttgtttgtacagaaattgaccctaagttggacaattattataagaaagacaattcttatttcacagagcaaccaattgatcttgtaccaaaccaaccatatccaaacgcaagcttcgataattttaagtttgtatgtgataatatcaaatttgctgatgatttaaaccagttaactggttataagaaacctgcttcaagagagcttaaagttacatttttccctgacttaaatggtgatgtggtggctattgattataaacactacacaccctcttttaagaaaggagctaaattgttacataaacctattgtttggcatgttaacaatgcaactaataaagccacgtataaaccaaatacctggtgtatacgttgtctttggagcacaaaaccagttgaaacatcaaattcgtttgatgtactgaagtcagaggacgcgcagggaatggataatcttgcctgcgaagatctaaaaccagtctctgaagaagtagtggaaaatcctaccatacagaaagacgttcttgagtgtaatgtgaaaactaccgaagttgtaggagacattatacttaaaccagcaaataatagtttaaaaattacagaagaggttggccacacagatctaatggctgcttatgtagacaattctagtcttactattaagaaacctaatgaattatctagagtattaggtttgaaaacccttgctactcatggtttagctgctgttaatagtgtcccttgggatactatagctaattatgctaagccttttcttaacaaagttgttagtacaactactaacatagttacacggtgtttaaaccgtgtttgtactaattatatgccttatttctttactttattgctacaattgtgtacttttactagaagtacaaattctagaattaaagcatctatgccgactactatagcaaagaatactgttaagagtgtcggtaaattttgtctagaggcttcatttaattatttgaagtcacctaatttttctaaactgataaatattataatttggtttttactattaagtgtttgcctaggttctttaatctactcaaccgctgctttaggtgttttaatgtctaatttaggcatgccttcttactgtactggttacagagaaggctatttgaactctactaatgtcactattgcaacctactgtactggttctataccttgtagtgtttgtcttagtggtttagattctttagacacctatccttctttagaaactatacaaattaccatttcatcttttaaatgggatttaactgcttttggcttagttgcagagtggtttttggcatatattcttttcactaggtttttctatgtacttggattggctgcaatcatgcaattgtttttcagctattttgcagtacattttattagtaattcttggcttatgtggttaataattaatcttgtacaaatggccccgatttcagctatggttagaatgtacatcttctttgcatcattttattatgtatggaaaagttatgtgcatgttgtagacggttgtaattcatcaacttgtatgatgtgttacaaacgtaatagagcaacaagagtcgaatgtacaactattgttaatggtgttagaaggtccttttatgtctatgctaatggaggtaaaggcttttgcaaactacacaattggaattgtgttaattgtgatacattctgtgctggtagtacatttattagtgatgaagttgcgagagacttgtcactacagtttaaaagaccaataaatcctactgaccagtcttcttacatcgttgatagtgttacagtgaagaatggttccatccatctttactttgataaagctggtcaaaagacttatgaaagacattctctctctcattttgttaacttagacaacctgagagctaataacactaaaggttcattgcctattaatgttatagtttttgatggtaaatcaaaatgtgaagaatcatctgcaaaatcagcgtctgtttactacagtcagcttatgtgtcaacctatactgttactagatcaggcattagtgtctgatgttggtgatagtgcggaagttgcagttaaaatgtttgatgcttacgttaatacgttttcatcaacttttaacgtaccaatggaaaaactcaaaacactagttgcaactgcagaagctgaacttgcaaagaatgtgtccttagacaatgtcttatctacttttatttcagcagctcggcaagggtttgttgattcagatgtagaaactaaagatgttgttgaatgtcttaaattgtcacatcaatctgacatagaagttactggcgatagttgtaataactatatgctcacctataacaaagttgaaaacatgacaccccgtgaccttggtgcttgtattgactgtagtgcgcgtcatattaatgcgcaggtagcaaaaagtcacaacattgctttgatatggaacgttaaagatttcatgtcattgtctgaacaactacgaaaacaaatacgtagtgctgctaaaaagaataacttaccttttaagttgacatgtgcaactactagacaagttgttaatgttgtaacaacaaagatagcacttaagggtggtaaaattgttaataattggttgaagcagttaattaaagttacacttgtgttcctttttgttgctgctattttctatttaataacacctgttcatgtcatgtctaaacatactgacttttcaagtgaaatcataggatacaaggctattgatggtggtgtcactcgtgacatagcatctacagatacttgttttgctaacaaacatgctgattttgacacatggtttagccagcgtggtggtagttatactaatgacaaagcttgcccattgattgctgcagtcataacaagagaagtgggttttgtcgtgcctggtttgcctggcacgatattacgcacaactaatggtgactttttgcatttcttacctagagtttttagtgcagttggtaacatctgttacacaccatcaaaacttatagagtacactgactttgcaacatcagcttgtgttttggctgctgaatgtacaatttttaaagatgcttctggtaagccagtaccatattgttatgataccaatgtactagaaggttctgttgcttatgaaagtttacgccctgacacacgttatgtgctcatggatggctctattattcaatttcctaacacctaccttgaaggttctgttagagtggtaacaacttttgattctgagtactgtaggcacggcacttgtgaaagatcagaagctggtgtttgtgtatctactagtggtagatgggtacttaacaatgattattacagatctttaccaggagttttctgtggtgtagatgctgtaaatttacttactaatatgtttacaccactaattcaacctattggtgctttggacatatcagcatctatagtagctggtggtattgtagctatcgtagtaacatgccttgcctactattttatgaggtttagaagagcttttggtgaatacagtcatgtagttgcctttaatactttactattccttatgtcattcactgtactctgtttaacaccagtttactcattcttacctggtgtttattctgttatttacttgtacttgacattttatcttactaatgatgtttcttttttagcacatattcagtggatggttatgttcacacctttagtacctttctggataacaattgcttatatcatttgtatttccacaaagcatttctattggttctttagtaattacctaaagagacgtgtagtctttaatggtgtttcctttagtacttttgaagaagctgcgctgtgcacctttttgttaaataaagaaatgtatctaaagttgcgtagtgatgtgctattacctcttacgcaatataatagatacttagctctttataataagtacaagtattttagtggagcaatggatacaactagctacagagaagctgcttgttgtcatctcgcaaaggctctcaatgacttcagtaactcaggttctgatgttctttaccaaccaccacaaacctctatcacctcagctgttttgcagagtggttttagaaaaatggcattcccatctggtaaagttgagggttgtatggtacaagtaacttgtggtacaactacacttaacggtctttggcttgatgacgtagtttactgtccaagacatgtgatctgcacctctgaagacatgcttaaccctaattatgaagatttactcattcgtaagtctaatcataatttcttggtacaggctggtaatgttcaactcagggttattggacattctatgcaaaattgtgtacttaagcttaaggttgatacagccaatcctaagacacctaagtataagtttgttcgcattcaaccaggacagactttttcagtgttagcttgttacaatggttcaccatctggtgtttaccaatgtgctatgaggcccaatttcactattaagggttcattccttaatggttcatgtggtagtgttggttttaacatagattatgactgtgtctctttttgttacatgcaccatatggaattaccaactggagttcatgctggcacagacttagaaggtaacttttatggaccttttgttgacaggcaaacagcacaagcagctggtacggacacaactattacagttaatgttttagcttggttgtacgctgctgttataaatggagacaggtggtttctcaatcgatttaccacaactcttaatgactttaaccttgtggctatgaagtacaattatgaacctctaacacaagaccatgttgacatactaggacctctttctgctcaaactggaattgccgttttagatatgtgtgcttcattaaaagaattactgcaaaatggtatgaatggacgtaccatattgggtagtgctttattagaagatgaatttacaccttttgatgttgttagacaatgctcaggtgttactttccaaagtgcagtgaaaagaacaatcaagggtacacaccactggttgttactcacaattttgacttcacttttagttttagtccagagtactcaatggtctttgttcttttttttgtatgaaaatgcctttttaccttttgctatgggtattattgctatgtctgcttttgcaatgatgtttgtcaaacataagcatgcgtttctatgtttatttttattaccgtcgctagcgacggtagcgtattttaatatggtatatatgccggcgtcgtgggtaatgcgtataatgacgtggttagatatggtagatacgtcgttatcgggttttaaactaaaagattgtgtaatgtatgcgtcggcggtagtattactaatactaatgacggcgcgtacggtatatgatgatggtgcgcgtcgtgtatggacgctaatgaatgtattaacgctagtatataaagtatattatgggaatgcgttagatcaagcgatatcgatgtgggcgctaataatatcggtaacgtcgaattattcgggtgtagtaacgacggtaatgtttttagcgcgtggtatagtatttatgtgtgtagaatattgtccgatattttttataacgggtaatacactacaatgtataatgctagtatattgttttttaggttatttttgtacgtgttattttggtctattttgtttactaaatcgttattttcgtctaacactaggtgtatatgattatttagtatcgacgcaagaatttcgttatatgaattcgcaaggtctactaccgccgaaaaattcgatagatgcgtttaaactaaatataaaattattaggtgtaggtggtaaaccgtgtataaaagtagcgacggtacaatcgaaaatgtcggatgtaaaatgtacatcggtagtattactatcggtattacaacaactacgtgtagaatcgtcgtcgaaattatgggcgcaatgtgtacaattacataatgatatactattagcgaaagatacgacggaagcgtttgaaaaaatggtatcgctactatcggtattactatcgatgcaaggtgcggtagatataaataaactatgtgaagaaatgctagataatcgtgcgacgttacaagcgatagcgtcggaattttcgtcgctaccgtcgtatgcggcgtttgcgacggcgcaagaagcgtatgaacaagcggtagcgaatggtgattcggaagtagtactaaaaaaattaaaaaaatcgttaaatgtagcgaaatcggaatttgatcgtgatgcggcgatgcaacgtaaattagaaaaaatggcggatcaagcgatgacgcaaatgtataaacaagcgcgttcggaagataaacgtgcgaaagtaacgtcggcgatgcaaacgatgctatttacgatgctacgtaaattagataatgatgcgctaaataatataataaataatgcgcgtgatggttgtgtaccgttaaatataataccgctaacgacggcggcgaaactaatggtagtaataccggattataatacatataaaaatacgtgtgatggtacgacgtttacgtatgcgtcggcgttatgggaaatacaacaagtagtagatgcggattcgaaaatagtacaactatcggaaatatcgatggataattcgccgaatttagcgtggccgctaatagtaacggcgttacgtgcgaattcggcggtaaaattacaaaataatgaactatcgccggtagcgctacgacagatgtcttgtgctgccggtactacacaaactgcttgcactgatgacaatgcgttagcttactacaacacaacaaagggaggtaggtttgtacttgcactgttatccgatttacaggatttgaaatgggctagattccctaagagtgatggaactggtactatctatacagaactggaaccaccttgtaggtttgttacagacacacctaaaggtcctaaagtgaagtatttatactttattaaaggattaaacaacctaaatagaggtatggtacttggtagtttagctgccacagtacgtctacaagctggtaatgcaacagaagtgcctgccaattcaactgtattatctttctgtgcttttgctgtagatgctgctaaagcttacaaagattatctagctagtgggggacaaccaatcactaattgtgttaagatgttgtgtacacacactggtactggtcaggcaataacagttacaccggaagccaatatggatcaagaatcctttggtggtgcatcgtgttgtctgtactgccgttgccacatagatcatccaaatcctaaaggattttgtgacttaaaaggtaagtatgtacaaatacctacaacttgtgctaatgaccctgtgggttttacacttaaaaacacagtctgtaccgtctgcggtatgtggaaaggttatggctgtagttgtgatcaactccgcgaacccatgcttcagtcagctgatgcacaatcgtttttaaacgggtttgcggtgtaagtgcagcccgtcttacaccgtgcggcacaggcactagtactgatgtcgtatacagggcttttgacatctacaatgataaagtagctggttttgctaaattcctaaaaactaattgttgtcgcttccaagaaaaggacgaagatgacaatttaattgattcttactttgtagttaagagacacactttctctaactaccaacatgaagaaacaatttataatttacttaaggattgtccagctgttgctaaacatgacttctttaagtttagaatagacggtgacatggtaccacatatatcacgtcaacgtcttactaaatacacaatggcagacctcgtctatgctttaaggcattttgatgaaggtaattgtgacacattaaaagaaatacttgtcacatacaattgttgtgatgatgattatttcaataaaaaggactggtatgattttgtagaaaacccagatatattacgcgtatacgccaacttaggtgaacgtgtacgccaagctttgttaaaaacagtacaattctgtgatgccatgcgaaatgctggtattgttggtgtactgacattagataatcaagatctcaatggtaactggtatgatttcggtgatttcatacaaaccacgccaggtagtggagttcctgttgtagattcttattattcattgttaatgcctatattaaccttgaccagggctttaactgcagagtcacatgttgacactgacttaacaaagccttacattaagtgggatttgttaaaatatgacttcacggaagagaggttaaaactctttgaccgttattttaaatattgggatcagacataccacccaaattgtgttaactgtttggatgacagatgcattctgcattgtgcaaactttaatgttttattctctacagtgttcccacctacaagttttggaccactagtgagaaaaatatttgttgatggtgttccatttgtagtttcaactggataccacttcagagagctaggtgttgtacataatcaggatgtaaacttacatagctctagacttagttttaaggaattacttgtgtatgctgctgaccctgctatgcacgctgcttctggtaatctattactagataaacgcactacgtgcttttcagtagctgcacttactaacaatgttgcttttcaaactgtcaaacccggtaattttaacaaagacttctatgactttgctgtgtctaagggtttctttaaggaaggaagttctgttgaattaaaacacttcttctttgctcaggatggtaatgctgctatcagcgattatgactactatcgttataatctaccaacaatgtgtgatatcagacaactactatttgtagttgaagttgttgataagtactttgattgttacgatggtggctgtattaatgctaaccaagtcatcgtcaacaacctagacaaatcagctggttttccatttaataaatggggtaaggctagactttattatgattcaatgagttatgaggatcaagatgcacttttcgcatatacaaaacgtaatgtcatccctactataactcaaatgaatcttaagtatgccattagtgcaaagaatagagctcgcaccgtagctggtgtctctatctgtagtactatgaccaatagacagtttcatcaaaaattattgaaatcaatagccgccactagaggagctactgtagtaattggaacaagcaaattctatggtggttggcacaacatgttaaaaactgtttatagtgatgtagaaaaccctcaccttatgggttgggattatcctaaatgtgatagagccatgcctaacatgcttagaattatggcctcacttgttcttgctcgcaaacatacaacgtgttgtagcttgtcacaccgtttctatagattagctaatgagtgtgctcaagtattgagtgaaatggtcatgtgtggcggttcactatatgttaaaccaggtggaacctcatcaggagatgccacaactgcttatgctaatagtgtttttaacatttgtcaagctgtcacggccaatgttaatgcacttttatctactgatggtaacaaaattgccgataagtatgtccgcaatttacaacacagactttatgagtgtctctatagaaatagagatgttgacacagactttgtgaatgagttttacgcatatttgcgtaaacatttctcaatgatgatactctctgacgatgctgttgtgtgtttcaatagcacttatgcatctcaaggtctagtggctagcataaagaactttaagtcagttctttattatcaaaacaatgtttttatgtctgaagcaaaatgttggactgagactgaccttactaaaggacctcatgaattttgctctcaacatacaatgctagttaaacagggtgatgattatgtgtaccttccttacccagatccatcaagaatcctaggggccggctgttttgtagatgatatcgtaaaaacagatggtacacttatgattgaacggttcgtgtctttagctatagatgcttacccacttactaaacatcctaatcaggagtatgctgatgtctttcatttgtacttacaatacataagaaagctacatgatgagttaacaggacacatgttagacatgtattctgttatgcttactaatgataacacttcaaggtattgggaacctgagttttatgaggctatgtacacaccgcatacagtcttacaggctgttggggcttgtgttctttgcaattcacagacttcattaagatgtggtgcttgcatacgtagaccattcttatgttgtaaatgctgttacgaccatgtcatatcaacatcacataaattagtcttgtctgttaatccgtatgtttgcaatgctccaggttgtgatgtcacagatgtgactcaactttacttaggaggtatgagctattattgtaaatcacataaaccacccattagttttccattgtgtgctaatggacaagtttttggtttatataaaaatacatgtgttggtagcgataatgttactgactttaatgcaattgcaacatgtgactggacaaatgctggtgattacattttagctaacacctgtactgaaagactcaagctttttgcagcagaaacgctcaaagctactgaggagacatttaaactgtcttatggtattgctactgtacgtgaagtgctgtctgacagagaattacatctttcatgggaagttggtaaacctagaccaccacttaaccgaaattatgtctttactggttatcgtgtaactaaaaacagtaaagtacaaataggagagtacacctttgaaaaaggtgactatggtgatgctgttgtttaccgaggtacaacaacttacaaattaaatgttggtgattattttgtgctgacatcacatacagtaatgccattaagtgcacctacactagtgccacaagagcactatgttagaattactggcttatacccaacactcaatatctcagatgagttttctagcaatgttgcaaattatcaaaaggttggtatgcaaaagtattctacactccagggaccacctggtactggtaagagtcattttgctattggcctagctctctactacccttctgctcgcatagtgtatacagcttgctctcatgccgctgttgatgcactatgtgagaaggcattaaaatatttgcctatagataaatgtagtagaattatacctgcacgtgctcgtgtagagtgttttgataaattcaaagtgaattcaacattagaacagtatgtcttttgtactgtaaatgcattgcctgagacgacagcagatatagttgtctttgatgaaatttcaatggccacaaattatgatttgagtgttgtcaatgccagattacgtgctaagcactatgtgtacattggcgaccctgctcaattacctgcaccacgcacattgctaactaagggcacactagaaccagaatatttcaattcagtgtgtagacttatgaaaactataggtccagacatgttcctcggaacttgtcggcgttgtcctgctgaaattgttgacactgtgagtgctttggtttatgataataagcttaaagcacataaagacaaatcagctcaatgctttaaaatgttttataagggtgttatcacgcatgatgtttcatctgcaattaacaggccacaaataggcgtggtaagagaattccttacacgtaaccctgcttggagaaaagctgtctttatttcaccttataattcacagaatgctgtagcctcaaagattttgggactaccaactcaaactgttgattcatcacagggctcagaatatgactatgtcatattcactcaaaccactgaaacagctcactcttgtaatgtaaacagatttaatgttgctattaccagagcaaaagtaggcatactttgcataatgtctgatagagacctttatgacaagttgcaatttacaagtcttgaaattccacgtaggaatgtggcaactttacaagctgaaaatgtaacaggactctttaaagattgtagtaaggtaatcactgggttacatcctacacaggcacctacacacctcagtgttgacactaaattcaaaactgaaggtttatgtgttgacatacctggcatacctaaggacatgacctatagaagactcatctctatgatgggttttaaaatgaattatcaagttaatggttaccctaacatgtttatcacccgcgaagaagctataagacatgtacgtgcatggattggcttcgatgtcgaggggtgtcatgctactagagaagctgttggtaccaatttacctttacagctaggtttttctacaggtgttaacctagttgctgtacctacaggttatgttgatacacctaataatacagatttttccagagttagtgctaaaccaccgcctggagatcaatttaaacacctcataccacttatgtacaaaggacttccttggaatgtagtgcgtataaagattgtacaaatgttaagtgacacacttaaaaatctctctgacagagtcgtatttgtcttatgggcacatggctttgagttgacatctatgaagtattttgtgaaaataggacctgagcgcacctgttgtctatgtgatagacgtgccacatgcttttccactgcttcagacacttatgcctgttggcatcattctattggatttgattacgtctataatccgtttatgattgatgttcaacaatggggttttacaggtaacctacaaagcaaccatgatctgtattgtcaagtccatggtaatgcacatgtagctagttgtgatgcaatcatgactaggtgtctagctgtccacgagtgctttgttaagcgtgttgactggactattgaatatcctataattggtgatgaactgaagattaatgcggcttgtagaaaggttcaacacatggttgttaaagctgcattattagcagacaaattcccagttcttcacgacattggtaaccctaaagctattaagtgtgtacctcaagctgatgtagaatggaagttctatgatgcacagccttgtagtgacaaagcttataaaatagaagaattattctattcttatgccacacattctgacaaattcacagatggtgtatgcctattttggaattgcaatgtcgatagatatcctgctaattccattgtttgtagatttgacactagagtgctatctaaccttaacttgcctggttgtgatggtggcagtttgtatgtaaataaacatgcattccacacaccagcttttgataaaagtgcttttgttaatttaaaacaattaccatttttctattactctgacagtccatgtgagtctcatggaaaacaagtagtgtcagatatagattatgtaccactaaagtctgctacgtgtataacacgttgcaatttaggtggtgctgtctgtagacatcatgctaatgagtacagattgtatctcgatgcttataacatgatgatctcagctggctttagcttgtgggtttacaaacaatttgatacttataacctctggaacacttttacaagacttcagagtttagaaaatgtggcttttaatgttgtaaataagggacactttgatggacaacagggtgaagtaccagtttctatcattaataacactgtttacacaaaagttgatggtgttgatgtagaattgtttgaaaataaaacaacattacctgttaatgtagcatttgagctttgggctaagcgcaacattaaaccagtaccagaggtgaaaatactcaataatttgggtgtggacattgctgctaatactgtgatctgggactacaaaagagatgctccagcacatatatctactattggtgtttgttctatgactgacatagccaagaaaccaactgaaacgatttgtgcaccactcactgtcttttttgatggtagagttgatggtcaagtagacttatttagaaatgcccgtaatggtgttcttattacagaaggtagtgttaaaggtttacaaccatctgtaggtcccaaacaagctagtcttaatggagtcacattaattggagaagccgtaaaaacacagttcaattattataagaaagttgatggtgttgtccaacaattacctgaaacttactttactcagagtagaaatttacaagaatttaaacccaggagtcaaatggaaattgatttcttagaattagctatggatgaattcattgaacggtataaattagaaggctatgccttcgaacatatcgtttatggagattttagtcatagtcagttaggtggtttacatctactgattggactagctaaacgttttaaggaatcaccttttgaattagaagattttattcctatggacagtacagttaaaaactatttcataacagatgcgcaaacaggttcatctaagtgtgtgtgttctgttattgatttattacttgatgattttgttgaaataataaaatcccaagatttatctgtagtttctaaggttgtcaaagtgactattgactatacagaaatttcatttatgctttggtgtaaagatggccatgtagaaacattttacccaaaattacaatctagtcaagcgtggcaaccgggtgttgctatgcctaatctttacaaaatgcaaagaatgctattagaaaagtgtgaccttcaaaattatggtgatagtgcaacattacctaaaggcataatgatgaatgtcgcaaaatatactcaactgtgtcaatatttaaacacattaacattagctgtaccctataatatgagagttatacattttggtgctggttctgataaaggagttgcaccaggtacagctgttttaagacagtggttgcctacgggtacgctgcttgtcgattcagatcttaatgactttgtctctgatgcagattcaactttgattggtgattgtgcaactgtacatacagctaataaatgggatctcattattagtgatatgtacgaccctaagactaaaaatgttacaaaagaaaatgactctaaagagggttttttcacttacatttgtgggtttatacaacaaaagctagctcttggaggttccgtggctataaagataacagaacattcttggaatgctgatctttataagctcatgggacacttcgcatggtggacagcctttgttactaatgtgaatgcgtcatcatctgaagcatttttaattggatgtaattatcttggcaaaccacgcgaacaaatagatggttatgtcatgcatgcaaattacatattttggaggaatacaaatccaattcagttgtcttcctattctttatttgacatgagtaaatttccccttaaattaaggggtactgctgttatgtctttaaaagaaggtcaaatcaatgatatgattttatctcttcttagtaaaggtagacttataattagagaaaacaacagagttgttatttctagtgatgttcttgttaacaactaaacgaacaatgtttgtttttcttgttttattgccactagtctctagtcagtgtgttaatcttacaaccagaactcaattaccccctgcatacactaattctttcacacgtggtgtttattaccctgacaaagttttcagatcctcagttttacattcaactcaggacttgttcttacctttcttttccaatgttacttggttccatgctatacatgtctctgggaccaatggtactaagaggtttgataaccctgtcctaccatttaatgatggtgtttattttgcttccactgagaagtctaacataataagaggctggatttttggtactactttagattcgaagacccagtccctacttattgttaataacgctactaatgttgttattaaagtctgtgaatttcaattttgtaatgatccatttttgggtgtttattaccacaaaaacaacaaaagttggatggaaagtgagttcagagtttattctagtgcgaataattgcacttttgaatatgtctctcagccttttcttatggaccttgaaggaaaacagggtaatttcaaaaatcttagggaatttgtgtttaagaatattgatggttattttaaaatatattctaagcacacgcctattaatttagtgcgtgatctcccccagggtttttcggctttagaaccattggtagatttgccaataggtattaacatcactaggtttcaaactttacttgctttacatagaagttatttgactcctggtgattcttcttcaggttggacagctggtgctgcagcttattatgtgggttatcttcaacctaggacttttctattaaaatataatgaaaatggaaccattacagatgctgtagactgtgcacttgaccctctctcagaaacaaagtgtacgttgaaatccttcactgtagaaaaaggaatctatcaaacttctaactttagagtccaaccaacagaatctattgttagatttcctaatattacaaacttgtgcccttttggtgaagtttttaacgccaccagatttgcatctgtttatgcttggaacaggaagagaatcagcaactgtgttgctgattattctgtcctatataattccgcatcattttccacttttaagtgttatggagtgtctcctactaaattaaatgatctctgctttactaatgtctatgcagattcatttgtaattagaggtgatgaagtcagacaaatcgctccagggcaaactggaaagattgctgattataattataaattaccagatgattttacaggctgcgttatagcttggaattctaacaatcttgattctaaggttggtggtaattataattacctgtatagattgtttaggaagtctaatctcaaaccttttgagagagatatttcaactgaaatctatcaggccggtagcacaccttgtaatggtgttgaaggttttaattgttactttcctttacaatcatatggtttccaacccactaatggtgttggttaccaaccatacagagtagtagtactttcttttgaacttctacatgcaccagcaactgtttgtggacctaaaaagtctactaatttggttaaaaacaaatgtgtcaatttcaacttcaatggtttaacaggcacaggtgttcttactgagtctaacaaaaagtttctgcctttccaacaatttggcagagacattgctgacactactgatgctgtccgtgatccacagacacttgagattcttgacattacaccatgttcttttggtggtgtcagtgttataacaccaggaacaaatacttctaaccaggttgctgttctttatcaggatgttaactgcacagaagtccctgttgctattcatgcagatcaacttactcctacttggcgtgtttattctacaggttctaatgtttttcaaacacgtgcaggctgtttaataggggctgaacatgtcaacaactcatatgagtgtgacatacccattggtgcaggtatatgcgctagttatcagactcagactaattctcctcggcgggcacgtagtgtagctagtcaatccatcattgcctacactatgtcacttggtgcagaaaattcagttgcttactctaataactctattgccatacccacaaattttactattagtgttaccacagaaattctaccagtgtctatgaccaagacatcagtagattgtacaatgtacatttgtggtgattcaactgaatgcagcaatcttttgttgcaatatggcagtttttgtacacaattaaaccgtgctttaactggaatagctgttgaacaagacaaaaacacccaagaagtttttgcacaagtcaaacaaatttacaaaacaccaccaattaaagattttggtggttttaatttttcacaaatattaccagatccatcaaaaccaagcaagaggtcatttattgaagatctacttttcaacaaagtgacacttgcagatgctggcttcatcaaacaatatggtgattgccttggtgatattgctgctagagacctcatttgtgcacaaaagtttaacggccttactgttttgccacctttgctcacagatgaaatgattgctcaatacacttctgcactgttagcgggtacaatcacttctggttggacctttggtgcaggtgctgcattacaaataccatttgctatgcaaatggcttataggtttaatggtattggagttacacagaatgttctctatgagaaccaaaaattgattgccaaccaatttaatagtgctattggcaaaattcaagactcactttcttccacagcaagtgcacttggaaaacttcaagatgtggtcaaccaaaatgcacaagctttaaacacgcttgttaaacaacttagctccaattttggtgcaatttcaagtgttttaaatgatatcctttcacgtcttgacaaagttgaggctgaagtgcaaattgataggttgatcacaggcagacttcaaagtttgcagacatatgtgactcaacaattaattagagctgcagaaatcagagcttctgctaatcttgctgctactaaaatgtcagagtgtgtacttggacaatcaaaaagagttgatttttgtggaaagggctatcatcttatgtccttccctcagtcagcacctcatggtgtagtcttcttgcatgtgacttatgtccctgcacaagaaaagaacttcacaactgctcctgccatttgtcatgatggaaaagcacactttcctcgtgaaggtgtctttgtttcaaatggcacacactggtttgtaacacaaaggaatttttatgaaccacaaatcattactacagacaacacatttgtgtctggtaactgtgatgttgtaataggaattgtcaacaacacagtttatgatcctttgcaacctgaattagactcattcaaggaggagttagataaatattttaagaatcatacatcaccagatgttgatttaggtgacatctctggcattaatgcttcagttgtaaacattcaaaaagaaattgaccgcctcaatgaggttgccaagaatttaaatgaatctctcatcgatctccaagaacttggaaagtatgagcagtatataaaatggccatggtacatttggctaggttttatagctggcttgattgccatagtaatggtgacaattatgctttgctgtatgaccagttgctgtagttgtctcaagggctgttgttcttgtggatcctgctgcaaatttgatgaagacgactctgagccagtgctcaaaggagtcaaattacattacacataaacgaacttatggatttgtttatgagaatcttcacaattggaactgtaactttgaagcaaggtgaaatcaaggatgctactccttcagattttgttcgcgctactgcaacgataccgatacaagcctcactccctttcggatggcttattgttggcgttgcacttcttgctgtttttcagagcgcttccaaaatcataaccctcaaaaagagatggcaactagcactctccaagggtgttcactttgtttgcaacttgctgttgttgtttgtaacagtttactcacaccttttgctcgttgctgctggccttgaagccccttttctctatctttatgctttagtctacttcttgcagagtataaactttgtaagaataataatgaggctttggctttgctggaaatgccgttccaaaaacccattactttatgatgccaactattttctttgctggcatactaattgttacgactattgtataccttacaatagtgtaacttcttcaattgtcattacttcaggtgatggcacaacaagtcctatttctgaacatgactaccagattggtggttatactgaaaaatgggaatctggagtaaaagactgtgttgtattacacagttacttcacttcagactattaccagctgtactcaactcaattgagtacagacactggtgttgaacatgttaccttcttcatctacaataaaattgttgatgagcctgaagaacatgtccaaattcacacaatcgacggttcatccggagttgttaatccagtaatggaaccaatttatgatgaaccgacgacgactactagcgtgcctttgtaagcacaagctgatgagtacgaacttatgtactcattcgtttcggaagagacaggtacgttaatagttaatagcgtacttctttttcttgctttcgtggtattcttgctagttacactagccatccttactgcgcttcgattgtgtgcgtactgctgcaatattgttaacgtgagtcttgtaaaaccttctttttacgtttactctcgtgttaaaaatctgaattcttctagagttcctgatcttctggtctaaacgaactaaatattatattagtttttctgtttggaactttaattttagccatggcagattccaacggtactattaccgttgaagagcttaaaaagctccttgaacaatggaacctagtaataggtttcctattccttacatggatttgtcttctacaatttgcctatgccaacaggaataggtttttgtatataattaagttaattttcctctggctgttatggccagtaactttagcttgttttgtgcttgctgctgtttacagaataaattggatcaccggtggaattgctatcgcaatggcttgtcttgtaggcttgatgtggctcagctacttcattgcttctttcagactgtttgcgcgtacgcgatccatgtggtcattcaatccagaaactaacattcttctcaacgtgccactccatggcactattctgaccagaccgcttctagaaagtgaactcgtaatcggagctgtgatccttcgtggacatcttcgtattgctggacaccatctaggacgctgtgacatcaaggacctgcctaaagaaatcactgttgctacatcacgaacgctttcttattacaaattgggagcttcgcagcgtgtagcaggtgactcaggttttgctgcatacagtcgctacaggattggcaactataaattaaacacagaccattccagtagcagtgacaatattgctttgcttgtacagtaagtgacaacagatgtttcatctcgttgactttcaggttactatagcagagatattactaattattatgaggacttttaaagtttccatttggaatcttgattacatcataaacctcataattaaaaatttatctaagtcactaactgagaataaatattctcaattagatgaagagcaaccaatggagattgattaaacgaacatgaaaattattcttttcttggcactgataacactcgctacttgtgagctttatcactaccaagagtgtgttagaggtacaacagtacttttaaaagaaccttgctcttctggaacatacgagggcaattcaccatttcatcctctagctgataacaaatttgcactgacttgctttagcactcaatttgcttttgcttgtcctgacggcgtaaaacacgtctatcagttacgtgccagatcagtttcacctaaactgttcatcagacaagaggaagttcaagaactttactctccaatttttcttattgttgcggcaatagtgtttataacactttgcttcacactcaaaagaaagacagaatgattgaactttcattaattgacttctatttgtgctttttagcctttctgctattccttgttttaattatgcttattatcttttggttctcacttgaactgcaagatcataatgaaacttgtcacgcctaaacgaacatgaaatttcttgttttcttaggaatcatcacaactgtagctgcatttcaccaagaatgtagtttacagtcatgtactcaacatcaaccatatgtagttgatgacccgtgtcctattcacttctattctaaatggtatattagagtaggagctagaaaatcagcacctttaattgaattgtgcgtggatgaggctggttctaaatcacccattcagtacatcgatatcggtaattatacagtttcctgtttaccttttacaattaattgccaggaacctaaattgggtagtcttgtagtgcgttgttcgttctatgaagactttttagagtatcatgacgttcgtgttgttttagatttcatctaaacgaacaaactaaaatgtctgataatggaccccaaaatcagcgaaatgcaccccgcattacgtttggtggaccctcagattcaactggcagtaaccagaatggagaacgcagtggggcgcgatcaaaacaacgtcggccccaaggtttacccaataatactgcgtcttggttcaccgctctcactcaacatggcaaggaagaccttaaattccctcgaggacaaggcgttccaattaacaccaatagcagtccagatgaccaaattggctactaccgaagagctaccagacgaattcgtggtggtgacggtaaaatgaaagatctcagtccaagatggtatttctactacctaggaactgggccagaagctggacttccctatggtgctaacaaagacggcatcatatgggttgcaactgagggagccttgaatacaccaaaagatcacattggcacccgcaatcctgctaacaatgctgcaatcgtgctacaacttcctcaaggaacaacattgccaaaaggcttctacgcagaagggagcagaggcggcagtcaagcctcttctcgttcctcatcacgtagtcgcaacagttcaagaaattcaactccaggcagcagtaggggaacttctcctgctagaatggctggcaatggcggtgatgctgctcttgctttgctgctgcttgacagattgaaccagcttgagagcaaaatgtctggtaaaggccaacaacaacaaggccaaactgtcactaagaaatctgctgctgaggcttctaagaagcctcggcaaaaacgtactgccactaaagcatacaatgtaacacaagctttcggcagacgtggtccagaacaaacccaaggaaattttggggaccaggaactaatcagacaaggaactgattacaaacattggccgcaaattgcacaatttgcccccagcgcttcagcgttcttcggaatgtcgcgcattggcatggaagtcacaccttcgggaacgtggttgacctacacaggtgccatcaaattggatgacaaagatccaaatttcaaagatcaagtcattttgctgaataagcatattgacgcatacaaaacattcccaccaacagagcctaaaaaggacaaaaagaagaaggctgatgaaactcaagccttaccgcagagacagaagaaacagcaaactgtgactcttcttcctgctgcagatttggatgatttctccaaacaattgcaacaatccatgagcagtgctgactcaactcaggcctaaactcatgcagaccacacaaggcagatgggctatataaacgttttcgcttttccgtttacgatatatagtctactcttgtgcagaatgaattctcgtaactacatagcacaagtagatgtagttaactttaatctcacatagcaatctttaatcagtgtgtaacattagggaggacttgaaagagccaccacattttcaccgaggccacgcggagtacgatcgagtgtacagtgaacaatgctagggagagctgcctatatggaagagccctaatgtgtaaaattaattttagtagtgctatccccatgtgattttaatagcttcttaggagaatgacaaaaaaaaaaaaaaaaaaaaaaaaaaaaaaaaaaaaaaaaaaaaaaaaaaaaaaaaaaagggtcggcatggcatctccacctcctcgcggtccgacctgggcatccgaaggaggacgcacgtccactcggatggctaagggagcagcacactggcggccgttactagggccgcgcccttcccaacagttgcgcagcctgaatggcgaatggagatccaatttttaagtgtataatgtgttaaactactgattctaattgtttgtgtattttagattcacagtcccaaggctcatttcaggcccctcagtcctcacagtctgttcatgatcataatcagccataccacatttgtagaggttttacttgctttaaaaaacctcccacacctccccctgaacctgaaacataaaatgaatgcaattgttgttgttaacttgtttattgcagcttataatggttacaaataaagcaatagcatcacaaatttcacaaataaagcatttttttcactgcattctagttgtggtttgtccaaactcatcaatgtatcttaaagcttgagtattctatagtctcacctaaatagcttggcgtaatcatggtcatagctgtttcctgtgtgaaattgttatccgctcacaattccacacaacatacgagccggaagcataaagtgtaaagcctggggtgcctaatgagtgagctaactcacattaattgcgttgcgctcactgcccgctttccagtcgggaaacctgtcgtgccagctgcattaatgaatcggccaacgcgaaccccttgcggccgcccgggccgtcgaccaattctcatgtttgacagcttatcatcgaatttctgccattcatccgcttattatcacttattcaggcgtagcaaccaggcgtttaagggcaccaataactgccttaaaaaaattacgccccgccctgccactcatcgcagtactgttgtaattcattaagcattctgccgacatggaagccatcacaaacggcatgatgaacctgaatcgccagcggcatcagcaccttgtcgccttgcgtataatatttgcccatggtgaaaacgggggcgaagaagttgtccatattggccacgtttaaatcaaaactggtgaaactcacccagggattggctgagacgaaaaacatattctcaataaaccctttagggaaataggccaggttttcaccgtaacacgccacatcttgcgaatatatgtgtagaaactgccggaaatcgtcgtggtattcactccagagcgatgaaaacgtttcagtttgctcatggaaaacggtgtaacaagggtgaacactatcccatatcaccagctcaccgtctttcattgccatacgaaattccggatgagcattcatcaggcgggcaagaatgtgaataaaggccggataaaacttgtgcttatttttctttacggtctttaaaaaggccgtaatatccagctgaacggtctggttataggtacattgagcaactgactgaaatgcctcaaaatgttctttacgatgccattgggatatatcaacggtggtatatccagtgatttttttctccattttagcttccttagctcctgaaaatctcgataactcaaaaaatacgcccggtagtgatcttatttcattatggtgaaagttggaacctcttacgtgccgatcaacgtctcattttcgccaaaagttggcccagggcttcccggtatcaacagggacaccaggatttatttattctgcgaagtgatcttccgtcacaggtatttattcgcgataagctcatggagcggcgtaaccgtcgcacaggaaggacagagaaagcgcggatctgggaagtgacggacagaacggtcaggacctggattggggaggcggttgccgccgctgctgctgacggtgtgacgttctctgttccggtcacaccacatacgttccgccattcctatgcgatgcacatgctgtatgccggtataccgctgaaagttctgcaaagcctgatgggacataagtccatcagttcaacggaagtctacacgaaggtttttgcgctggatgtggctgcccggcaccgggtgcagtttgcgatgccggagtctgatgcggttgcgatgctgaaacaattatcctgagaataaatgccttggcctttatatggaaatgtggaactgagtggatatgctgtttttgtctgttaaacagagaagctggctgttatccactgagaagcgaacgaaacagtcgggaaaatctcccattatcgtagagatccgcattattaatctcaggagcctgtgtagcgtttataggaagtagtgttctgtcatgatgcctgcaagcggtaacgaaaacgatttgaatatgccttcaggaacaatagaaatcttcgtgcggtgttacgttgaagtggagcggattatgtcagcaatggacagaacaacctaatgaacacagaaccatgatgtggtctgtccttttacagccagtagtgctcgccgcagtcgagcgacagggcgaagccctcggctggttgccctcgccgctgggctggcggccgtctatggccctgcaaacgcgccagaaacgccgtcgaagccgtgtgcgagacaccgcggccggccgccggcgttgtggatacctcgcggaaaacttggccctcactgacagatgaggggcggacgttgacacttgaggggccgactcacccggcgcggcgttgacagatgaggggcaggctcgatttcggccggcgacgtggagctggccagcctcgcaaatcggcgaaaacgcctgattttacgcgagtttcccacagatgatgtggacaagcctggggataagtgccctgcggtattgacacttgaggggcgcgactactgacagatgaggggcgcgatccttgacacttgaggggcagagtgctgacagatgaggggcgcacctattgacatttgaggggctgtccacaggcagaaaatccagcatttgcaagggtttccgcccgtttttcggccaccgctaacctgtcttttaacctgcttttaaaccaatatttataaaccttgtttttaaccagggctgcgccctgtgcgcgtgaccgcgcacgccgaaggggggtgcccccccttctcgaaccctcccggtcgagtgagcgaggaagcaccagggaacagcacttatatattctgcttacacacgatgcctgaaaaaacttcccttggggttatccacttatccacggggatatttttataattattttttttatagtttttagatcttcttttttagagcgccttgtaggcctttatccatgctggttctagagaaggtgttgtgacaaattgccctttcagtgtgacaaatcaccctcaaatgacagtcctgtctgtgacaaattgcccttaaccctgtgacaaattgccctcagaagaagctgttttttcacaaagttatccctgcttattgactcttttttatttagtgtgacaatctaaaaacttgtcacacttcacatggatctgtcatggcggaaacagcggttatcaatcacaagaaacgtaaaaatagcccgcgaatcgtccagtcaaacgacctcactgaggcggcatatagtctctcccgggatcaaaaacgtatgctgtatctgttcgttgaccagatcagaaaatctgatggcaccctacaggaacatgacggtatctgcgagatccatgttgctaaatatgctgaaatattcggattgacctctgcggaagccagtaaggatatacggcaggcattgaagagtttcgcggggaaggaagtggttttttatcgccctgaagaggatgccggcgatgaaaaaggctatgaatcttttccttggtttatcaaacgtgcgcacagtccatccagagggctttacagtgtacatatcaacccatatctcattcccttctttatcgggttacagaaccggtttacgcagtttcggcttagtgaaacaaaagaaatcaccaatccgtatgccatgcgtttatacgaatccctgtgtcagtatcgtaagccggatggctcaggcatcgtctctctgaaaatcgactggatcatagagcgttaccagctgcctcaaagttaccagcgtatgcctgacttccgccgccgcttcctgcaggtctgtgttaatgagatcaacagcagaactccaatgcgcctctcatacattgagaaaaagaaaggccgccagacgactcatatcgtattttccttccgcgatatcacttccatgacgacaggatagtctgagggttatctgtcacagatttgagggtggttcgtcacatttgttctgacctactgagggtaatttgtcacagttttgctgtttccttcagcctgcatggattttctcatactttttgaactgtaatttttaaggaagccaaatttgagggcagtttgtcacagttgatttccttctctttcccttcgtcatgtgacctgatatcgggggttagttcgtcatcattgatgagggttgattatcacagtttattactctgaattggctatccgcgtgtgtacctctacctggagtttttcccacggtggatatttcttcttgcgctgagcgtaagagctatctgacagaacagttcttctttgcttcctcgccagttcgctcgctatgctcggttacacggctgcggcg

SEQ ID NO: 31 - DNA, 35283 bp, Artificial Sequence
  Clone pCCI-4K-SARS-CoV-2-WDDDD. Based on SARS-CoV-2.
gatgtgctgcaaggcgattaagttgggtaacgccagggttttcccagtcacgacgttgtaaaacgacggccagtgaattgtaatacgactcactatagggcgaattctagttattaatagtaatcaattacggggtcattagttcatagcccatatatggagttccgcgttacataacttacggtaaatggcccgcctggctgaccgcccaacgacccccgcccattgacgtcaataatgacgtatgttcccatagtaacgccaatagggactttccattgacgtcaatgggtggagtatttacggtaaactgcccacttggcagtacatcaagtgtatcatatgccaagtacgccccctattgacgtcaatgacggtaaatggcccgcctggcattatgcccagtacatgaccttatgggactttcctacttggcagtacatctacgtattagtcatcgctattaccatggtgatgcggttttggcagtacatcaatgggcgtggatagcggtttgactcacggggatttccaagtctccaccccattgacgtcaatgggagtttgttttggcaccaaaatcaacgggactttccaaaatgtcgtaacaactccgccccattgacgcaaatgggcggtaggcgtgtacggtgggaggtctatataagcagagctggtttagtgaaccgtattaaaggtttataccttcccaggtaacaaaccaaccaactttcgatctcttgtagatctgttctctaaacgaactttaaaatctgtgtggctgtcactcggctgcatgcttagtgcactcacgcagtataattaataactaattactgtcgttgacaggacacgagtaactcgtctatcttctgcaggctgcttacggtttcgtccgtgttgcagccgatcatcagcacatctaggtttcgtccgggtgtgaccgaaaggtaagatggagagccttgtccctggtttcaacgagaaaacacacgtccaactcagtttgcctgttttacaggttcgcgacgtgctcgtacgtggctttggagactccgtggaggaggtcttatcagaggcacgtcaacatcttaaagatggcacttgtggcttagtagaagttgaaaaaggcgttttgcctcaacttgaacagccctatgtgttcatcaaacgttcggatgctcgaactgcacctcatggtcatgttatggttgagctggtagcagaactcgaaggcattcagtacggtcgtagtggtgagacacttggtgtccttgtccctcatgtgggcgaaataccagtggcttaccgcaaggttcttcttcgtaagaacggtaataaaggagctggtggccatagttacggcgccgatctaaagtcatttgacttaggcgacgagcttggcactgatccttatgaagattttcaagaaaactggaacactaaacatagcagtggtgttacccgtgaactcatgcgtgagcttaacggaggggcatacactcgctatgtcgataacaacttctgtggccctgatggctaccctcttgagtgcattaaagaccttctagcacgtgctggtaaagcttcatgcactttgtccgaacaactggactttattgacactaagaggggtgtatactgctgccgtgaacatgagcatgaaattgcttggtacacggaacgttctgaaaagagctatgaattgcagacaccttttgaaattaaattggcaaagaaatttgacaccttcaatggggaatgtccaaattttgtatttcccttaaattccataatcaagactattcaaccaagggttgaaaagaaaaagcttgatggctttatgggtagaattcgatctgtctatccagttgcgtcaccaaatgaatgcaaccaaatgtgcctttcaactctcatgaagtgtgatcattgtggtgaaacttcatggcagacgggcgattttgttaaagccacttgcgaattttgtggcactgagaatttgactaaagaaggtgccactacttgtggttacttaccccaaaatgctgttgttaaaatttattgtccagcatgtcacaattcagaagtaggacctgagcatagtcttgccgaataccataatgaatctggcttgaaaaccattcttcgtaagggtggtcgcactattgcctttggaggctgtgtgttctcttatgttggttgccataacaagtgtgcctattgggtcccacgtgctagcgctaacataggttgtaaccatacaggtgttgttggagaaggttccgaaggtcttaatgacaaccttcttgaaatactccaaaaagagaaagtcaacatcaatattgttggtgactttaaacttaatgaagagatcgccattattttggcatctttttctgcttccacaagtgcttttgtggaaactgtgaaaggtttggattataaagcattcaaacaaattgttgaatcctgtggtaattttaaagttacaaaaggaaaagctaaaaaaggtgcctggaatattggtgaacagaaatcaatactgagtcctctttatgcatttgcatcagaggctgctcgtgttgtacgatcaattttctcccgcactcttgaaactgctcaaaattctgtgcgtgttttacagaaggccgctataacaatactagatggaatttcacagtattcactgagactcattgatgctatgatgttcacatctgatttggctactaacaatctagttgtaatggcctacattacaggtggtgttgttcagttgacttcgcagtggctaactaacatctttggcactgtttatgaaaaactcaaacccgtccttgattggcttgaagagaagtttaaggaaggtgtagagtttcttagagacggttgggaaattgttaaatttatctcaacctgtgcttgtgaaattgtcggtggacaaattgtcacctgtgcaaaggaaattaaggagagtgttcagacattctttaagcttgtaaataaatttttggctttgtgtgctgactctatcattattggtggagctaaacttaaagccttgaatttaggtgaaacatttgtcacgcactcaaagggattgtacagaaagtgtgttaaatccagagaagaaactggcctactcatgcctctaaaagccccaaaagaaattatcttcttagagggagaaacacttcccacagaagtgttaacagaggaagttgtcttgaaaactggtgatttacaaccattagaacaacctactagtgaagctgttgaagctccattggttggtacaccagtttgtattaacgggcttatgttgctcgaaatcaaagacacagaaaagtactgtgcccttgcacctaatatgatggtaacaaacaataccttcacactcaaaggcggtgcaccaacaaaggttacttttggtgatgacactgtgatagaagtgcaaggttacaagagtgtgaatatcacttttgaacttgatgaaaggattgataaagtacttaatgagaagtgctctgcctatacagttgaactcggtacagaagtaaatgagttcgcctgtgttgtggcagatgctgtcataaaaactttgcaaccagtatctgaattacttacaccactgggcattgatttagatgagtggagtatggctacatactacttatttgatgagtctggtgagtttaaattggcttcacatatgtattgttctttctaccctccagatgaggatgaagaagaaggtgattgtgaagaagaagagtttgagccatcaactcaatatgagtatggtactgaagatgattaccaaggtaaacctttggaatttggtgccacttctgctgctcttcaacctgaagaagagcaagaagaagattggttagatgatgatagtcaacaaactgttggtcaacaagacggcagtgaggacaatcagacaactactattcaaacaattgttgaggttcaacctcaattagagatggaacttacaccagttgttcagactattgaagtgaatagttttagtggttatttaaaacttactgacaatgtatacattaaaaatgcagacattgtggaagaagctaaaaaggtaaaaccaacagtggttgttaatgcagccaatgtttaccttaaacatggaggaggtgttgcaggagccttaaataaggctactaacaatgccatgcaagttgaatctgatgattacatagctactaatggaccacttaaagtgggtggtagttgtgttttaagcggacacaatcttgctaaacactgtcttcatgttgtcggcccaaatgttaacaaaggtgaagacattcaacttcttaagagtgcttatgaaaattttaatcagcacgaagttctacttgcaccattattatcagctggtatttttggtgctgaccctatacattctttaagagtttgtgtagatactgttcgcacaaatgtctacttagctgtctttgataaaaatctctatgacaaacttgtttcaagctttttggaaatgaagagtgaaaagcaagttgaacaaaagatcgctgagattcctaaagaggaagttaagccatttataactgaaagtaaaccttcagttgaacagagaaaacaagatgataagaaaatcaaagcttgtgttgaagaagttacaacaactctggaagaaactaagttcctcacagaaaacttgttactttatattgacattaatggcaatcttcatccagattctgccactcttgttagtgacattgacatcactttcttaaagaaagatgctccatatatagtgggtgatgttgttcaagagggtgttttaactgctgtggttatacctactaaaaaggctggtggcactactgaaatgctagcgaaagctttgagaaaagtgccaacagacaattatataaccacttacccgggtcaaggtttaaatggttatacggtagaagaagcgaaaacggtactaaaaaaatgtaaatcggcgttttatatactaccgtcgataatatcgaatgaaaaacaagaaatactaggtacggtatcgtggaatttacgtgaaatgctagcgcatgcggaagaaacacgtaaattaatgccggtatgtgtagaaacgaaagcgatagtatcgacgatacaacgtaaatataaaggtataaaaatacaagaaggtgtagtagattatggtgcgcgtttttatttttatacgtcgaaaacgacggtagcgtcgctaataaatacgctaaatgatctaaatgaaacgctagtaacgatgccgctaggttatgtaacgcatggtttaaatttagaagaagcggcgcgttatatgcgttcgctaaaagtaccggcgacggtatcggtatcgtcgccggatgcggtaacggcgtataatggttatctaacgtcgtcgtcgaaaacgccggaagaacattttatagaaacgatatcgctagcgggttcgtataaagattggtcgtattcgggtcaatcgacgcaactaggtatagaatttctaaaacgtggtgataaatcggtatattatacgtcgaatccgacgacgtttcatctagatggtgaagtaataacgtttgataatctaaaaacgctactatcgttacgtgaagtacgtacgataaaagtatttacgacggtagataatataaatctacatacgcaagtagtagatatgtcgatgacatatggacaacaatttggtccgacgtatttagatggtgcggatgttacgaaaataaaaccgcataattcgcatgaaggtaaaacgttttatgtattaccgaatgatgatacgctacgtgtagaagcgtttgaatattatcatacgactgatccgtcgtttctaggtcgttatatgtcggcgttaaatcatacgaaaaaatggaaatatccgcaagtaaatggtttaacgtcgataaaatgggcggataataattgttatctagcgacggcgttattaacgctacaacaaatagaattaaaatttaatccgccggcgctacaagatgcgtattatcgtgcgcgtgcgggtgaagcggcgaatttttgtgcgctaatattagcgtattgtaataaaacggtaggtgaattaggtgatgtacgtgaaacgatgtcgtatttatttcaacatgcgaatttagattcgtgtaaacgtgtattaaatgtagtatgtaaaacgtgtggtcaacaacaaacgacgctaaaaggtgtagaagcggtaatgtatatgggtacgctatcgtatgaacaatttaaaaaaggtgtacaaataccgtgtacgtgtggtaaacaagcgacgaaatatctagtacaacaagaatcgccgtttgtaatgatgtcggcgccgccggcgcaatatgaactaaaacatggtacgtttacgtgtgcgtcggaatatacgggtaattatcaatgtggtcattataaacatataacgtcgaaagaaacgttatattgtatagatggtgcgttacttacgaaatcgtcggaatataaaggtccgataacggatgtattttataaagaaaattcgtatacgacgacgataaaaccggtaacgtataaattagatggtgtagtatgtacggaaatagatccgaaattagataattattataaaaaagataattcgtattttacggaacaaccgatagatctagtaccgaatcaaccatatccgaatgcgtcgtttgataattttaaatttgtatgtgataatataaaatttgcggatgatttaaatcaattaacgggttataaaaaaccggcgtcgcgtgaactaaaagtaacgttttttccggatttaaatggtgatgtagtagcgatagattataaacattatacgccgtcgtttaaaaaaggtgcgaaattattacataaaccgatagtatggcatgtaaataatgcgacgaataaagcgacgtataaaccgaatacgtggtgtatacggtgtctatggagcacgaaaccggtagaaacgtcgaattcgtttgatgtactaaaatcggaagatgcgcaaggtatggataatctagcgtgtgaagatctaaaaccggtatcggaagaagtagtagaaaatccgacgatacaaaaagatgtactggaatgtaatgtaaaaacgacggaagtagtaggtgatataatactaaaaccggctaataattcgttaaaaataacggaagaagtaggtcatacggatctaatggcggcgtatgtagataattcgtcgctaacgataaaaaaaccgaatgaattatcgcgtgtattaggtttaaaaacgctagcgacgcatggtttagctgctgtaaattcggtaccgtgggatacgatagcgaattatgcgaaaccgtttctaaataaagtagtatcgacgacgacgaatatagtaacgcgatgtttaaatcgtgtatgtacgaattatatgccgtatttttttacgttattactacaattatgtacgtttacgcgatcgacgaattcgcgtataaaagcgtcgatgccgacgacgatagcgaaaaatacggtaaaatcggtaggtaaattttgtctagaagcgtcgtttaattatttaaaatcgccgaatttttctaaactaataaatataataatatggtttttactattatcggtatgcctaggttcgttaatatattcgacggcggcgttaggtgtattaatgtcgaatttaggtatgccgtcgtattgtacgggttatcgtgaaggttatttaaattcgacgaatgtaacgatagcgacgtattgtacgggttcgataccgtgttcggtatgtctatcgggtttagattcgttagatacgtatccgtcgttagaaacgatacaaataacgatatcgtcgtttaaatgggatttaacggcgtttggtttagtagcggaatggtttttagcgtatatactatttacgcgatttttttatgtactaggtttagcggcgataatgcaattatttttttcgtattttgcggtacattttatttcgaattcgtggctaatgtggttaataataaatctagtacaaatggcgccgatatcggcgatggtacgtatgtatatattttttgcgtcgttttattatgtatggaaatcgtatgtacatgtagtagatggttgtaattcgtcgacgtgtatgatgtgttataaacgtaatcgtgcgacgcgagtagaatgtacgacgatagtaaatggtgtacgtcgttcgttttatgtatatgcgaatggtggtaaaggtttttgtaaactacataattggaattgtgtaaattgtgatacgttttgtgcgggttcgacgtttatatcggatgaagtagcgcgtgatttatcgctacaatttaaacgtccgataaatccgacggatcaatcgtcgtatatagtagattcggtaacggtaaaaaatggttcgatacatctatattttgataaagcgggtcaaaaaacgtatgaacgtcattcgctatcgcattttgtaaatttagataatctacgtgcgaataatacgaaaggttcgttaccgataaatgtaatagtatttgatggtaaatcgaaatgtgaagaatcgtcggcgaaatcggcgtcggtatattattcgcaactaatgtgtcaaccgatactattactagatcaagcgttagtatcggatgtaggtgattcggcggaagtagcggtaaaaatgtttgatgcgtatgtaaatacgttttcgtcgacgtttaatgtaccgatggaaaaactaaaaacgctagtagcgacggcggaagcggaactagcgaaaaatgtatctttagataatgtattatcgacgtttatatcggcggcgcgtcaaggttttgtagattcggatgtagaaacgaaagatgtagtagaatgtctaaaattatcgcatcaatcggatatagaagtaacgggtgattcgtgtaataattatatgctaacgtataataaagtagaaaatatgacgccgcgtgatctaggtgcgtgtatagattgttcggcgcgtcatataaatgcgcaagtagcgaaatcgcataatatagcgttaatatggaatgtaaaagattttatgtcgttatcggaacaactacgtaaacaaatacgttcggcggcgaaaaaaaataatttaccgtttaaattaacgtgtgcgacgacgcgacaagtagtaaatgtagtaacgacgaaaatagcgctaaaaggtggtaaaatagtaaataattggttaaaacaattaattaaagtaacgctagtatttctatttgtagcggcgatattttatttaataacgccggtacatgtaatgtcgaaacatacggatttttcgtcggaaataataggttataaagcgatagatggtggtgtaactcgtgatatagcgtcgacggatacgtgttttgcgaataaacatgcggattttgatacgtggttttcgcaacgtggtggttcgtatacgaatgataaagcgtgtccgttaatagcggcggtaataacacgtgaagtaggttttgtagtaccgggtttaccgggtacgatattacgtacgacgaatggtgattttttacattttttaccgcgtgtattttcggcggtaggtaatatatgttatacgccgtcgaaactaatagaatatacggattttgcgacgtcggcgtgtgtattagcggcggaatgtacgatatttaaagatgcgtcgggtaaaccggtaccgtattgttatgatacgaatgtactagaaggttcggtagcgtatgaatcgttacgcccggatacacgttatgtactaatggatggttcgataatacaatttccgaatacgtatctagaaggttcggtacgtgtagtaacgacgtttgattcggaatattgtcgtcatggtacgtgtgaacgttcggaagcgggtgtatgtgtatcgacgtcggggcgttgggtactaaataatgattattatcgttcgttaccgggtgtattctgtggtgtagatgcggtaaatttactaacgaatatgtttacgccgctgatacaaccgataggtgcgttagatatatcggcgtcgatagtagcgggtggtatagtagcgatagtagtaacgtgtctagcgtattattttatgcgttttcgtcgtgcgtttggtgaatattcgcatgtagtagcgtttaatacgttactatttctaatgtcttttacagtactatgtttaacgccggtatattcttttttaccgggtgtatattcggtaatatatttatatttaacgttttatctaacgaatgatgtatcgtttttagcgcatatacaatggatggtaatgtttacgccgttagtaccgttttggataacaatagcgtatataatatgtatatcgacgaaacatttttattggtttttttcgaattatctgaaacgtcgtgtagtatttaatggtgtatctttttcgacgtttgaagaagcggcgctatgtacatttttattaaataaagaaatgtatctaaaattacgttcggatgtactattaccgctaacgcaatataatcgttatttagcgctatataataaatataaatatttttcgggtgcgatggatacgacgtcgtatcgtgaagcggcgtgttgtcatctagcgaaagcgctaaatgatttttcgaattcgggttcggatgtactatatcaaccgccgcaaacgtcgataacgtcggcggtattacaatcgggttttcgtaaaatggcgtttccgtcgggtaaagtagaaggttgtatggtacaagtaacgtgtggtacgacgacgctaaatggtctatggctagatgatgtagtatattgtccgcgtcatgtaatatgtacgtcggaagatatgctaaatccgaattatgaagatttactaatacgtaaatcgaatcataattttttagtacaagcgggtaatgtacaactacgtgtaataggtcattcgatgcaaaattgtgtactaaaactaaaagtagatacggcgaatccgaaaacaccgaaatataaatttgtacgtatacaaccgggtcaaacgttttcggtattagcgtgttataatggttctccgtcgggtgtatatcaatgtgcgatgcgtccgaattttacgattaaaggttcgtttctaaatggttcgtgtggttcggtaggttttaatatagattatgattgtgtatcgttttgttatatgcatcatatggaattaccgacgggtgtacatgcgggtacggatttagaaggtaatttttatggtccgtttgtagatcgtcaaacagcgcaagcggcgggtacggatacgacgattacggtaaatgtattagcgtggttatatgcggcggtaataaatggtgatcgttggtttctaaatcgttttacgacgacgctaaatgattttaatctagtagcgatgaaatataattatgaaccgctgacacaagatcatgtagatatactaggtccgctatcggcgcaaacgggtatagcggtattagatatgtgtgcgtcgttaaaagaattactacaaaatggtatgaatggtcgtacgatattaggttcggcgttattagaagatgaatttacgccgtttgatgtagtacgtcaatgttcgggtgtaacgtttcaatcggcggtaaaacgtacgataaaaggtacgcatcattggttattactaacgatattaacgtcgctattagtattagtacaatcgacgcaatggtcgttatttttttttttatatgaaaatgcgtttttaccgtttgcgatgggtataatagcgatgtcggcgtttgcgatgatgtttgtaaaacataagcatgcgtttctatgtttatttttattaccgtcgctagcgacggtagcgtattttaatatggtatatatgccggcgtcgtgggtaatgcgtataatgacgtggttagatatggtagatacgtcgttatcgggttttaaactaaaagattgtgtaatgtatgcgtcggcggtagtattactaatactaatgacggcgcgtacggtatatgatgatggtgcgcgtcgtgtatggacgctaatgaatgtattaacgctagtatataaagtatattatgggaatgcgttagatcaagcgatatcgatgtgggcgctaataatatcggtaacgtcgaattattcgggtgtagtaacgacggtaatgtttttagcgcgtggtatagtatttatgtgtgtagaatattgtccgatattttttataacgggtaatacactacaatgtataatgctagtatattgttttttaggttatttttgtacgtgttattttggtctattttgtttactaaatcgttattttcgtctaacactaggtgtatatgattatttagtatcgacgcaagaatttcgttatatgaattcgcaaggtctactaccgccgaaaaattcgatagatgcgtttaaactaaatataaaattattaggtgtaggtggtaaaccgtgtataaaagtagcgacggtacaatcgaaaatgtcggatgtaaaatgtacatcggtagtattactatcggtattacaacaactacgtgtagaatcgtcgtcgaaattatgggcgcaatgtgtacaattacataatgatatactattagcgaaagatacgacggaagcgtttgaaaaaatggtatcgctactatcggtattactatcgatgcaaggtgcggtagatataaataaactatgtgaagaaatgctagataatcgtgcgacgttacaagcgatagcgtcggaattttcgtcgctaccgtcgtatgcggcgtttgcgacggcgcaagaagcgtatgaacaagcggtagcgaatggtgattcggaagtagtactaaaaaaattaaaaaaatcgttaaatgtagcgaaatcggaatttgatcgtgatgcggcgatgcaacgtaaattagaaaaaatggcggatcaagcgatgacgcaaatgtataaacaagcgcgttcggaagataaacgtgcgaaagtaacgtcggcgatgcaaacgatgctatttacgatgctacgtaaattagataatgatgcgctaaataatataataaataatgcgcgtgatggttgtgtaccgttaaatataataccgctaacgacggcggcgaaactaatggtagtaataccggattataatacatataaaaatacgtgtgatggtacgacgtttacgtatgcgtcggcgttatgggaaatacaacaagtagtagatgcggattcgaaaatagtacaactatcggaaatatcgatggataattcgccgaatttagcgtggccgctaatagtaacggcgttacgtgcgaattcggcggtaaaattacaaaataatgaactatcgccggtagcgctacgacagatgtcttgtgctgccggtactacacaaactgcttgcactgatgacaatgcgttagcttactacaacacaacaaagggaggtaggtttgtacttgcactgttatccgatttacaggatttgaaatgggctagattccctaagagtgatggaactggtactatctatacagaactggaaccaccttgtaggtttgttacagacacacctaaaggtcctaaagtgaagtatttatactttattaaaggattaaacaacctaaatagaggtatggtacttggtagtttagctgccacagtacgtctacaagctggtaatgcaacagaagtgcctgccaattcaactgtattatctttctgtgcttttgctgtagatgctgctaaagcttacaaagattatctagctagtgggggacaaccaatcactaattgtgttaagatgttgtgtacacacactggtactggtcaggcaataacagttacaccggaagccaatatggatcaagaatcctttggtggtgcatcgtgttgtctgtactgccgttgccacatagatcatccaaatcctaaaggattttgtgacttaaaaggtaagtatgtacaaatacctacaacttgtgctaatgaccctgtgggttttacacttaaaaacacagtctgtaccgtctgcggtatgtggaaaggttatggctgtagttgtgatcaactccgcgaacccatgcttcagtcagctgatgcacaatcgtttttaaacgggtttgcggtgtaagtgcagcccgtcttacaccgtgcggcacaggcactagtactgatgtcgtatacagggcttttgacatctacaatgataaagtagctggttttgctaaattcctaaaaactaattgttgtcgcttccaagaaaaggacgaagatgacaatttaattgattcttactttgtagttaagagacacactttctctaactaccaacatgaagaaacaatttataatttacttaaggattgtccagctgttgctaaacatgacttctttaagtttagaatagacggtgacatggtaccacatatatcacgtcaacgtcttactaaatacacaatggcagacctcgtctatgctttaaggcattttgatgaaggtaattgtgacacattaaaagaaatacttgtcacatacaattgttgtgatgatgattatttcaataaaaaggactggtatgattttgtagaaaacccagatatattacgcgtatacgccaacttaggtgaacgtgtacgccaagctttgttaaaaacagtacaattctgtgatgccatgcgaaatgctggtattgttggtgtactgacattagataatcaagatctcaatggtaactggtatgatttcggtgatttcatacaaaccacgccaggtagtggagttcctgttgtagattcttattattcattgttaatgcctatattaaccttgaccagggctttaactgcagagtcacatgttgacactgacttaacaaagccttacattaagtgggatttgttaaaatatgacttcacggaagagaggttaaaactctttgaccgttattttaaatattgggatcagacataccacccaaattgtgttaactgtttggatgacagatgcattctgcattgtgcaaactttaatgttttattctctacagtgttcccacctacaagttttggaccactagtgagaaaaatatttgttgatggtgttccatttgtagtttcaactggataccacttcagagagctaggtgttgtacataatcaggatgtaaacttacatagctctagacttagttttaaggaattacttgtgtatgctgctgaccctgctatgcacgctgcttctggtaatctattactagataaacgcactacgtgcttttcagtagctgcacttactaacaatgttgcttttcaaactgtcaaacccggtaattttaacaaagacttctatgactttgctgtgtctaagggtttctttaaggaaggaagttctgttgaattaaaacacttcttctttgctcaggatggtaatgctgctatcagcgattatgactactatcgttataatctaccaacaatgtgtgatatcagacaactactatttgtagttgaagttgttgataagtactttgattgttacgatggtggctgtattaatgctaaccaagtcatcgtcaacaacctagacaaatcagctggttttccatttaataaatggggtaaggctagactttattatgattcaatgagttatgaggatcaagatgcacttttcgcatatacaaaacgtaatgtcatccctactataactcaaatgaatcttaagtatgccattagtgcaaagaatagagctcgcaccgtagctggtgtctctatctgtagtactatgaccaatagacagtttcatcaaaaattattgaaatcaatagccgccactagaggagctactgtagtaattggaacaagcaaattctatggtggttggcacaacatgttaaaaactgtttatagtgatgtagaaaaccctcaccttatgggttgggattatcctaaatgtgatagagccatgcctaacatgcttagaattatggcctcacttgttcttgctcgcaaacatacaacgtgttgtagcttgtcacaccgtttctatagattagctaatgagtgtgctcaagtattgagtgaaatggtcatgtgtggcggttcactatatgttaaaccaggtggaacctcatcaggagatgccacaactgcttatgctaatagtgtttttaacatttgtcaagctgtcacggccaatgttaatgcacttttatctactgatggtaacaaaattgccgataagtatgtccgcaatttacaacacagactttatgagtgtctctatagaaatagagatgttgacacagactttgtgaatgagttttacgcatatttgcgtaaacatttctcaatgatgatactctctgacgatgctgttgtgtgtttcaatagcacttatgcatctcaaggtctagtggctagcataaagaactttaagtcagttctttattatcaaaacaatgtttttatgtctgaagcaaaatgttggactgagactgaccttactaaaggacctcatgaattttgctctcaacatacaatgctagttaaacagggtgatgattatgtgtaccttccttacccagatccatcaagaatcctaggggccggctgttttgtagatgatatcgtaaaaacagatggtacacttatgattgaacggttcgtgtctttagctatagatgcttacccacttactaaacatcctaatcaggagtatgctgatgtctttcatttgtacttacaatacataagaaagctacatgatgagttaacaggacacatgttagacatgtattctgttatgcttactaatgataacacttcaaggtattgggaacctgagttttatgaggctatgtacacaccgcatacagtcttacaggctgttggggcttgtgttctttgcaattcacagacttcattaagatgtggtgcttgcatacgtagaccattcttatgttgtaaatgctgttacgaccatgtcatatcaacatcacataaattagtcttgtctgttaatccgtatgtttgcaatgctccaggttgtgatgtcacagatgtgactcaactttacttaggaggtatgagctattattgtaaatcacataaaccacccattagttttccattgtgtgctaatggacaagtttttggtttatataaaaatacatgtgttggtagcgataatgttactgactttaatgcaattgcaacatgtgactggacaaatgctggtgattacattttagctaacacctgtactgaaagactcaagctttttgcagcagaaacgctcaaagctactgaggagacatttaaactgtcttatggtattgctactgtacgtgaagtgctgtctgacagagaattacatctttcatgggaagttggtaaacctagaccaccacttaaccgaaattatgtctttactggttatcgtgtaactaaaaacagtaaagtacaaataggagagtacacctttgaaaaaggtgactatggtgatgctgttgtttaccgaggtacaacaacttacaaattaaatgttggtgattattttgtgctgacatcacatacagtaatgccattaagtgcacctacactagtgccacaagagcactatgttagaattactggcttatacccaacactcaatatctcagatgagttttctagcaatgttgcaaattatcaaaaggttggtatgcaaaagtattctacactccagggaccacctggtactggtaagagtcattttgctattggcctagctctctactacccttctgctcgcatagtgtatacagcttgctctcatgccgctgttgatgcactatgtgagaaggcattaaaatatttgcctatagataaatgtagtagaattatacctgcacgtgctcgtgtagagtgttttgataaattcaaagtgaattcaacattagaacagtatgtcttttgtactgtaaatgcattgcctgagacgacagcagatatagttgtctttgatgaaatttcaatggccacaaattatgatttgagtgttgtcaatgccagattacgtgctaagcactatgtgtacattggcgaccctgctcaattacctgcaccacgcacattgctaactaagggcacactagaaccagaatatttcaattcagtgtgtagacttatgaaaactataggtccagacatgttcctcggaacttgtcggcgttgtcctgctgaaattgttgacactgtgagtgctttggtttatgataataagcttaaagcacataaagacaaatcagctcaatgctttaaaatgttttataagggtgttatcacgcatgatgtttcatctgcaattaacaggccacaaataggcgtggtaagagaattccttacacgtaaccctgcttggagaaaagctgtctttatttcaccttataattcacagaatgctgtagcctcaaagattttgggactaccaactcaaactgttgattcatcacagggctcagaatatgactatgtcatattcactcaaaccactgaaacagctcactcttgtaatgtaaacagatttaatgttgctattaccagagcaaaagtaggcatactttgcataatgtctgatagagacctttatgacaagttgcaatttacaagtcttgaaattccacgtaggaatgtggcaactttacaagctgaaaatgtaacaggactctttaaagattgtagtaaggtaatcactgggttacatcctacacaggcacctacacacctcagtgttgacactaaattcaaaactgaaggtttatgtgttgacatacctggcatacctaaggacatgacctatagaagactcatctctatgatgggttttaaaatgaattatcaagttaatggttaccctaacatgtttatcacccgcgaagaagctataagacatgtacgtgcatggattggcttcgatgtcgaggggtgtcatgctactagagaagctgttggtaccaatttacctttacagctaggtttttctacaggtgttaacctagttgctgtacctacaggttatgttgatacacctaataatacagatttttccagagttagtgctaaaccaccgcctggagatcaatttaaacacctcataccacttatgtacaaaggacttccttggaatgtagtgcgtataaagattgtacaaatgttaagtgacacacttaaaaatctctctgacagagtcgtatttgtcttatgggcacatggctttgagttgacatctatgaagtattttgtgaaaataggacctgagcgcacctgttgtctatgtgatagacgtgccacatgcttttccactgcttcagacacttatgcctgttggcatcattctattggatttgattacgtctataatccgtttatgattgatgttcaacaatggggttttacaggtaacctacaaagcaaccatgatctgtattgtcaagtccatggtaatgcacatgtagctagttgtgatgcaatcatgactaggtgtctagctgtccacgagtgctttgttaagcgtgttgactggactattgaatatcctataattggtgatgaactgaagattaatgcggcttgtagaaaggttcaacacatggttgttaaagctgcattattagcagacaaattcccagttcttcacgacattggtaaccctaaagctattaagtgtgtacctcaagctgatgtagaatggaagttctatgatgcacagccttgtagtgacaaagcttataaaatagaagaattattctattcttatgccacacattctgacaaattcacagatggtgtatgcctattttggaattgcaatgtcgatagatatcctgctaattccattgtttgtagatttgacactagagtgctatctaaccttaacttgcctggttgtgatggtggcagtttgtatgtaaataaacatgcattccacacaccagcttttgataaaagtgcttttgttaatttaaaacaattaccatttttctattactctgacagtccatgtgagtctcatggaaaacaagtagtgtcagatatagattatgtaccactaaagtctgctacgtgtataacacgttgcaatttaggtggtgctgtctgtagacatcatgctaatgagtacagattgtatctcgatgcttataacatgatgatctcagctggctttagcttgtgggtttacaaacaatttgatacttataacctctggaacacttttacaagacttcagagtttagaaaatgtggcttttaatgttgtaaataagggacactttgatggacaacagggtgaagtaccagtttctatcattaataacactgtttacacaaaagttgatggtgttgatgtagaattgtttgaaaataaaacaacattacctgttaatgtagcatttgagctttgggctaagcgcaacattaaaccagtaccagaggtgaaaatactcaataatttgggtgtggacattgctgctaatactgtgatctgggactacaaaagagatgctccagcacatatatctactattggtgtttgttctatgactgacatagccaagaaaccaactgaaacgatttgtgcaccactcactgtcttttttgatggtagagttgatggtcaagtagacttatttagaaatgcccgtaatggtgttcttattacagaaggtagtgttaaaggtttacaaccatctgtaggtcccaaacaagctagtcttaatggagtcacattaattggagaagccgtaaaaacacagttcaattattataagaaagttgatggtgttgtccaacaattacctgaaacttactttactcagagtagaaatttacaagaatttaaacccaggagtcaaatggaaattgatttcttagaattagctatggatgaattcattgaacggtataaattagaaggctatgccttcgaacatatcgtttatggagattttagtcatagtcagttaggtggtttacatctactgattggactagctaaacgttttaaggaatcaccttttgaattagaagattttattcctatggacagtacagttaaaaactatttcataacagatgcgcaaacaggttcatctaagtgtgtgtgttctgttattgatttattacttgatgattttgttgaaataataaaatcccaagatttatctgtagtttctaaggttgtcaaagtgactattgactatacagaaatttcatttatgctttggtgtaaagatggccatgtagaaacattttacccaaaattacaatctagtcaagcgtggcaaccgggtgttgctatgcctaatctttacaaaatgcaaagaatgctattagaaaagtgtgaccttcaaaattatggtgatagtgcaacattacctaaaggcataatgatgaatgtcgcaaaatatactcaactgtgtcaatatttaaacacattaacattagctgtaccctataatatgagagttatacattttggtgctggttctgataaaggagttgcaccaggtacagctgttttaagacagtggttgcctacgggtacgctgcttgtcgattcagatcttaatgactttgtctctgatgcagattcaactttgattggtgattgtgcaactgtacatacagctaataaatgggatctcattattagtgatatgtacgaccctaagactaaaaatgttacaaaagaaaatgactctaaagagggttttttcacttacatttgtgggtttatacaacaaaagctagctcttggaggttccgtggctataaagataacagaacattcttggaatgctgatctttataagctcatgggacacttcgcatggtggacagcctttgttactaatgtgaatgcgtcatcatctgaagcatttttaattggatgtaattatcttggcaaaccacgcgaacaaatagatggttatgtcatgcatgcaaattacatattttggaggaatacaaatccaattcagttgtcttcctattctttatttgacatgagtaaatttccccttaaattaaggggtactgctgttatgtctttaaaagaaggtcaaatcaatgatatgattttatctcttcttagtaaaggtagacttataattagagaaaacaacagagttgttatttctagtgatgttcttgttaacaactaaacgaacaatgtttgtttttcttgttttattgccactagtctctagtcagtgtgttaatcttacaaccagaactcaattaccccctgcatacactaattctttcacacgtggtgtttattaccctgacaaagttttcagatcctcagttttacattcaactcaggacttgttcttacctttcttttccaatgttacttggttccatgctatacatgtctctgggaccaatggtactaagaggtttgataaccctgtcctaccatttaatgatggtgtttattttgcttccactgagaagtctaacataataagaggctggatttttggtactactttagattcgaagacccagtccctacttattgttaataacgctactaatgttgttattaaagtctgtgaatttcaattttgtaatgatccatttttgggtgtttattaccacaaaaacaacaaaagttggatggaaagtgagttcagagtttattctagtgcgaataattgcacttttgaatatgtctctcagccttttcttatggaccttgaaggaaaacagggtaatttcaaaaatcttagggaatttgtgtttaagaatattgatggttattttaaaatatattctaagcacacgcctattaatttagtgcgtgatctcccccagggtttttcggctttagaaccattggtagatttgccaataggtattaacatcactaggtttcaaactttacttgctttacatagaagttatttgactcctggtgattcttcttcaggttggacagctggtgctgcagcttattatgtgggttatcttcaacctaggacttttctattaaaatataatgaaaatggaaccattacagatgctgtagactgtgcacttgaccctctctcagaaacaaagtgtacgttgaaatccttcactgtagaaaaaggaatctatcaaacttctaactttagagtccaaccaacagaatctattgttagatttcctaatattacaaacttgtgcccttttggtgaagtttttaacgccaccagatttgcatctgtttatgcttggaacaggaagagaatcagcaactgtgttgctgattattctgtcctatataattccgcatcattttccacttttaagtgttatggagtgtctcctactaaattaaatgatctctgctttactaatgtctatgcagattcatttgtaattagaggtgatgaagtcagacaaatcgctccagggcaaactggaaagattgctgattataattataaattaccagatgattttacaggctgcgttatagcttggaattctaacaatcttgattctaaggttggtggtaattataattacctgtatagattgtttaggaagtctaatctcaaaccttttgagagagatatttcaactgaaatctatcaggccggtagcacaccttgtaatggtgttgaaggttttaattgttactttcctttacaatcatatggtttccaacccactaatggtgttggttaccaaccatacagagtagtagtactttcttttgaacttctacatgcaccagcaactgtttgtggacctaaaaagtctactaatttggttaaaaacaaatgtgtcaatttcaacttcaatggtttaacaggcacaggtgttcttactgagtctaacaaaaagtttctgcctttccaacaatttggcagagacattgctgacactactgatgctgtccgtgatccacagacacttgagattcttgacattacaccatgttcttttggtggtgtcagtgttataacaccaggaacaaatacttctaaccaggttgctgttctttatcaggatgttaactgcacagaagtccctgttgctattcatgcagatcaacttactcctacttggcgtgtttattctacaggttctaatgtttttcaaacacgtgcaggctgtttaataggggctgaacatgtcaacaactcatatgagtgtgacatacccattggtgcaggtatatgcgctagttatcagactcagactaattctcctcggcgggcacgtagtgtagctagtcaatccatcattgcctacactatgtcacttggtgcagaaaattcagttgcttactctaataactctattgccatacccacaaattttactattagtgttaccacagaaattctaccagtgtctatgaccaagacatcagtagattgtacaatgtacatttgtggtgattcaactgaatgcagcaatcttttgttgcaatatggcagtttttgtacacaattaaaccgtgctttaactggaatagctgttgaacaagacaaaaacacccaagaagtttttgcacaagtcaaacaaatttacaaaacaccaccaattaaagattttggtggttttaatttttcacaaatattaccagatccatcaaaaccaagcaagaggtcatttattgaagatctacttttcaacaaagtgacacttgcagatgctggcttcatcaaacaatatggtgattgccttggtgatattgctgctagagacctcatttgtgcacaaaagtttaacggccttactgttttgccacctttgctcacagatgaaatgattgctcaatacacttctgcactgttagcgggtacaatcacttctggttggacctttggtgcaggtgctgcattacaaataccatttgctatgcaaatggcttataggtttaatggtattggagttacacagaatgttctctatgagaaccaaaaattgattgccaaccaatttaatagtgctattggcaaaattcaagactcactttcttccacagcaagtgcacttggaaaacttcaagatgtggtcaaccaaaatgcacaagctttaaacacgcttgttaaacaacttagctccaattttggtgcaatttcaagtgttttaaatgatatcctttcacgtcttgacaaagttgaggctgaagtgcaaattgataggttgatcacaggcagacttcaaagtttgcagacatatgtgactcaacaattaattagagctgcagaaatcagagcttctgctaatcttgctgctactaaaatgtcagagtgtgtacttggacaatcaaaaagagttgatttttgtggaaagggctatcatcttatgtccttccctcagtcagcacctcatggtgtagtcttcttgcatgtgacttatgtccctgcacaagaaaagaacttcacaactgctcctgccatttgtcatgatggaaaagcacactttcctcgtgaaggtgtctttgtttcaaatggcacacactggtttgtaacacaaaggaatttttatgaaccacaaatcattactacagacaacacatttgtgtctggtaactgtgatgttgtaataggaattgtcaacaacacagtttatgatcctttgcaacctgaattagactcattcaaggaggagttagataaatattttaagaatcatacatcaccagatgttgatttaggtgacatctctggcattaatgcttcagttgtaaacattcaaaaagaaattgaccgcctcaatgaggttgccaagaatttaaatgaatctctcatcgatctccaagaacttggaaagtatgagcagtatataaaatggccatggtacatttggctaggttttatagctggcttgattgccatagtaatggtgacaattatgctttgctgtatgaccagttgctgtagttgtctcaagggctgttgttcttgtggatcctgctgcaaatttgatgaagacgactctgagccagtgctcaaaggagtcaaattacattacacataaacgaacttatggatttgtttatgagaatcttcacaattggaactgtaactttgaagcaaggtgaaatcaaggatgctactccttcagattttgttcgcgctactgcaacgataccgatacaagcctcactccctttcggatggcttattgttggcgttgcacttcttgctgtttttcagagcgcttccaaaatcataaccctcaaaaagagatggcaactagcactctccaagggtgttcactttgtttgcaacttgctgttgttgtttgtaacagtttactcacaccttttgctcgttgctgctggccttgaagccccttttctctatctttatgctttagtctacttcttgcagagtataaactttgtaagaataataatgaggctttggctttgctggaaatgccgttccaaaaacccattactttatgatgccaactattttctttgctggcatactaattgttacgactattgtataccttacaatagtgtaacttcttcaattgtcattacttcaggtgatggcacaacaagtcctatttctgaacatgactaccagattggtggttatactgaaaaatgggaatctggagtaaaagactgtgttgtattacacagttacttcacttcagactattaccagctgtactcaactcaattgagtacagacactggtgttgaacatgttaccttcttcatctacaataaaattgttgatgagcctgaagaacatgtccaaattcacacaatcgacggttcatccggagttgttaatccagtaatggaaccaatttatgatgaaccgacgacgactactagcgtgcctttgtaagcacaagctgatgagtacgaacttatgtactcattcgtttcggaagagacaggtacgttaatagttaatagcgtacttctttttcttgctttcgtggtattcttgctagttacactagccatccttactgcgcttcgattgtgtgcgtactgctgcaatattgttaacgtgagtcttgtaaaaccttctttttacgtttactctcgtgttaaaaatctgaattcttctagagttcctgatcttctggtctaaacgaactaaatattatattagtttttctgtttggaactttaattttagccatggcagattccaacggtactattaccgttgaagagcttaaaaagctccttgaacaatggaacctagtaataggtttcctattccttacatggatttgtcttctacaatttgcctatgccaacaggaataggtttttgtatataattaagttaattttcctctggctgttatggccagtaactttagcttgttttgtgcttgctgctgtttacagaataaattggatcaccggtggaattgctatcgcaatggcttgtcttgtaggcttgatgtggctcagctacttcattgcttctttcagactgtttgcgcgtacgcgatccatgtggtcattcaatccagaaactaacattcttctcaacgtgccactccatggcactattctgaccagaccgcttctagaaagtgaactcgtaatcggagctgtgatccttcgtggacatcttcgtattgctggacaccatctaggacgctgtgacatcaaggacctgcctaaagaaatcactgttgctacatcacgaacgctttcttattacaaattgggagcttcgcagcgtgtagcaggtgactcaggttttgctgcatacagtcgctacaggattggcaactataaattaaacacagaccattccagtagcagtgacaatattgctttgcttgtacagtaagtgacaacagatgtttcatctcgttgactttcaggttactatagcagagatattactaattattatgaggacttttaaagtttccatttggaatcttgattacatcataaacctcataattaaaaatttatctaagtcactaactgagaataaatattctcaattagatgaagagcaaccaatggagattgattaaacgaacatgaaaattattcttttcttggcactgataacactcgctacttgtgagctttatcactaccaagagtgtgttagaggtacaacagtacttttaaaagaaccttgctcttctggaacatacgagggcaattcaccatttcatcctctagctgataacaaatttgcactgacttgctttagcactcaatttgcttttgcttgtcctgacggcgtaaaacacgtctatcagttacgtgccagatcagtttcacctaaactgttcatcagacaagaggaagttcaagaactttactctccaatttttcttattgttgcggcaatagtgtttataacactttgcttcacactcaaaagaaagacagaatgattgaactttcattaattgacttctatttgtgctttttagcctttctgctattccttgttttaattatgcttattatcttttggttctcacttgaactgcaagatcataatgaaacttgtcacgcctaaacgaacatgaaatttcttgttttcttaggaatcatcacaactgtagctgcatttcaccaagaatgtagtttacagtcatgtactcaacatcaaccatatgtagttgatgacccgtgtcctattcacttctattctaaatggtatattagagtaggagctagaaaatcagcacctttaattgaattgtgcgtggatgaggctggttctaaatcacccattcagtacatcgatatcggtaattatacagtttcctgtttaccttttacaattaattgccaggaacctaaattgggtagtcttgtagtgcgttgttcgttctatgaagactttttagagtatcatgacgttcgtgttgttttagatttcatctaaacgaacaaactaaaatgtctgataatggaccccaaaatcagcgaaatgcaccccgcattacgtttggtggaccctcagattcaactggcagtaaccagaatggagaacgcagtggggcgcgatcaaaacaacgtcggccccaaggtttacccaataatactgcgtcttggttcaccgctctcactcaacatggcaaggaagaccttaaattccctcgaggacaaggcgttccaattaacaccaatagcagtccagatgaccaaattggctactaccgaagagctaccagacgaattcgtggtggtgacggtaaaatgaaagatctcagtccaagatggtatttctactacctaggaactgggccagaagctggacttccctatggtgctaacaaagacggcatcatatgggttgcaactgagggagccttgaatacaccaaaagatcacattggcacccgcaatcctgctaacaatgctgcaatcgtgctacaacttcctcaaggaacaacattgccaaaaggcttctacgcagaagggagcagaggcggcagtcaagcctcttctcgttcctcatcacgtagtcgcaacagttcaagaaattcaactccaggcagcagtaggggaacttctcctgctagaatggctggcaatggcggtgatgctgctcttgctttgctgctgcttgacagattgaaccagcttgagagcaaaatgtctggtaaaggccaacaacaacaaggccaaactgtcactaagaaatctgctgctgaggcttctaagaagcctcggcaaaaacgtactgccactaaagcatacaatgtaacacaagctttcggcagacgtggtccagaacaaacccaaggaaattttggggaccaggaactaatcagacaaggaactgattacaaacattggccgcaaattgcacaatttgcccccagcgcttcagcgttcttcggaatgtcgcgcattggcatggaagtcacaccttcgggaacgtggttgacctacacaggtgccatcaaattggatgacaaagatccaaatttcaaagatcaagtcattttgctgaataagcatattgacgcatacaaaacattcccaccaacagagcctaaaaaggacaaaaagaagaaggctgatgaaactcaagccttaccgcagagacagaagaaacagcaaactgtgactcttcttcctgctgcagatttggatgatttctccaaacaattgcaacaatccatgagcagtgctgactcaactcaggcctaaactcatgcagaccacacaaggcagatgggctatataaacgttttcgcttttccgtttacgatatatagtctactcttgtgcagaatgaattctcgtaactacatagcacaagtagatgtagttaactttaatctcacatagcaatctttaatcagtgtgtaacattagggaggacttgaaagagccaccacattttcaccgaggccacgcggagtacgatcgagtgtacagtgaacaatgctagggagagctgcctatatggaagagccctaatgtgtaaaattaattttagtagtgctatccccatgtgattttaatagcttcttaggagaatgacaaaaaaaaaaaaaaaaaaaaaaaaaaaaaaaaaaaaaaaaaaaaaaaaaaaaaaaaaaagggtcggcatggcatctccacctcctcgcggtccgacctgggcatccgaaggaggacgcacgtccactcggatggctaagggagcagcacactggcggccgttactagggccgcgcccttcccaacagttgcgcagcctgaatggcgaatggagatccaatttttaagtgtataatgtgttaaactactgattctaattgtttgtgtattttagattcacagtcccaaggctcatttcaggcccctcagtcctcacagtctgttcatgatcataatcagccataccacatttgtagaggttttacttgctttaaaaaacctcccacacctccccctgaacctgaaacataaaatgaatgcaattgttgttgttaacttgtttattgcagcttataatggttacaaataaagcaatagcatcacaaatttcacaaataaagcatttttttcactgcattctagttgtggtttgtccaaactcatcaatgtatcttaaagcttgagtattctatagtctcacctaaatagcttggcgtaatcatggtcatagctgtttcctgtgtgaaattgttatccgctcacaattccacacaacatacgagccggaagcataaagtgtaaagcctggggtgcctaatgagtgagctaactcacattaattgcgttgcgctcactgcccgctttccagtcgggaaacctgtcgtgccagctgcattaatgaatcggccaacgcgaaccccttgcggccgcccgggccgtcgaccaattctcatgtttgacagcttatcatcgaatttctgccattcatccgcttattatcacttattcaggcgtagcaaccaggcgtttaagggcaccaataactgccttaaaaaaattacgccccgccctgccactcatcgcagtactgttgtaattcattaagcattctgccgacatggaagccatcacaaacggcatgatgaacctgaatcgccagcggcatcagcaccttgtcgccttgcgtataatatttgcccatggtgaaaacgggggcgaagaagttgtccatattggccacgtttaaatcaaaactggtgaaactcacccagggattggctgagacgaaaaacatattctcaataaaccctttagggaaataggccaggttttcaccgtaacacgccacatcttgcgaatatatgtgtagaaactgccggaaatcgtcgtggtattcactccagagcgatgaaaacgtttcagtttgctcatggaaaacggtgtaacaagggtgaacactatcccatatcaccagctcaccgtctttcattgccatacgaaattccggatgagcattcatcaggcgggcaagaatgtgaataaaggccggataaaacttgtgcttatttttctttacggtctttaaaaaggccgtaatatccagctgaacggtctggttataggtacattgagcaactgactgaaatgcctcaaaatgttctttacgatgccattgggatatatcaacggtggtatatccagtgatttttttctccattttagcttccttagctcctgaaaatctcgataactcaaaaaatacgcccggtagtgatcttatttcattatggtgaaagttggaacctcttacgtgccgatcaacgtctcattttcgccaaaagttggcccagggcttcccggtatcaacagggacaccaggatttatttattctgcgaagtgatcttccgtcacaggtatttattcgcgataagctcatggagcggcgtaaccgtcgcacaggaaggacagagaaagcgcggatctgggaagtgacggacagaacggtcaggacctggattggggaggcggttgccgccgctgctgctgacggtgtgacgttctctgttccggtcacaccacatacgttccgccattcctatgcgatgcacatgctgtatgccggtataccgctgaaagttctgcaaagcctgatgggacataagtccatcagttcaacggaagtctacacgaaggtttttgcgctggatgtggctgcccggcaccgggtgcagtttgcgatgccggagtctgatgcggttgcgatgctgaaacaattatcctgagaataaatgccttggcctttatatggaaatgtggaactgagtggatatgctgtttttgtctgttaaacagagaagctggctgttatccactgagaagcgaacgaaacagtcgggaaaatctcccattatcgtagagatccgcattattaatctcaggagcctgtgtagcgtttataggaagtagtgttctgtcatgatgcctgcaagcggtaacgaaaacgatttgaatatgccttcaggaacaatagaaatcttcgtgcggtgttacgttgaagtggagcggattatgtcagcaatggacagaacaacctaatgaacacagaaccatgatgtggtctgtccttttacagccagtagtgctcgccgcagtcgagcgacagggcgaagccctcggctggttgccctcgccgctgggctggcggccgtctatggccctgcaaacgcgccagaaacgccgtcgaagccgtgtgcgagacaccgcggccggccgccggcgttgtggatacctcgcggaaaacttggccctcactgacagatgaggggcggacgttgacacttgaggggccgactcacccggcgcggcgttgacagatgaggggcaggctcgatttcggccggcgacgtggagctggccagcctcgcaaatcggcgaaaacgcctgattttacgcgagtttcccacagatgatgtggacaagcctggggataagtgccctgcggtattgacacttgaggggcgcgactactgacagatgaggggcgcgatccttgacacttgaggggcagagtgctgacagatgaggggcgcacctattgacatttgaggggctgtccacaggcagaaaatccagcatttgcaagggtttccgcccgtttttcggccaccgctaacctgtcttttaacctgcttttaaaccaatatttataaaccttgtttttaaccagggctgcgccctgtgcgcgtgaccgcgcacgccgaaggggggtgcccccccttctcgaaccctcccggtcgagtgagcgaggaagcaccagggaacagcacttatatattctgcttacacacgatgcctgaaaaaacttcccttggggttatccacttatccacggggatatttttataattattttttttatagtttttagatcttcttttttagagcgccttgtaggcctttatccatgctggttctagagaaggtgttgtgacaaattgccctttcagtgtgacaaatcaccctcaaatgacagtcctgtctgtgacaaattgcccttaaccctgtgacaaattgccctcagaagaagctgttttttcacaaagttatccctgcttattgactcttttttatttagtgtgacaatctaaaaacttgtcacacttcacatggatctgtcatggcggaaacagcggttatcaatcacaagaaacgtaaaaatagcccgcgaatcgtccagtcaaacgacctcactgaggcggcatatagtctctcccgggatcaaaaacgtatgctgtatctgttcgttgaccagatcagaaaatctgatggcaccctacaggaacatgacggtatctgcgagatccatgttgctaaatatgctgaaatattcggattgacctctgcggaagccagtaaggatatacggcaggcattgaagagtttcgcggggaaggaagtggttttttatcgccctgaagaggatgccggcgatgaaaaaggctatgaatcttttccttggtttatcaaacgtgcgcacagtccatccagagggctttacagtgtacatatcaacccatatctcattcccttctttatcgggttacagaaccggtttacgcagtttcggcttagtgaaacaaaagaaatcaccaatccgtatgccatgcgtttatacgaatccctgtgtcagtatcgtaagccggatggctcaggcatcgtctctctgaaaatcgactggatcatagagcgttaccagctgcctcaaagttaccagcgtatgcctgacttccgccgccgcttcctgcaggtctgtgttaatgagatcaacagcagaactccaatgcgcctctcatacattgagaaaaagaaaggccgccagacgactcatatcgtattttccttccgcgatatcacttccatgacgacaggatagtctgagggttatctgtcacagatttgagggtggttcgtcacatttgttctgacctactgagggtaatttgtcacagttttgctgtttccttcagcctgcatggattttctcatactttttgaactgtaatttttaaggaagccaaatttgagggcagtttgtcacagttgatttccttctctttcccttcgtcatgtgacctgatatcgggggttagttcgtcatcattgatgagggttgattatcacagtttattactctgaattggctatccgcgtgtgtacctctacctggagtttttcccacggtggatatttcttcttgcgctgagcgtaagagctatctgacagaacagttcttctttgcttcctcgccagttcgctcgctatgctcggttacacggctgcggcg

SEQ ID NO: 32 - DNA, 35283 bp, Artificial Sequence
  Severe acute respiratory syndrome coronavirus 2 isolate Wuhan-Hu-1, partial genome, partial ORF1a
gatgtgctgcaaggcgattaagttgggtaacgccagggttttcccagtcacgacgttgtaaaacgacggccagtgaattgtaatacgactcactatagggcgaattctagttattaatagtaatcaattacggggtcattagttcatagcccatatatggagttccgcgttacataacttacggtaaatggcccgcctggctgaccgcccaacgacccccgcccattgacgtcaataatgacgtatgttcccatagtaacgccaatagggactttccattgacgtcaatgggtggagtatttacggtaaactgcccacttggcagtacatcaagtgtatcatatgccaagtacgccccctattgacgtcaatgacggtaaatggcccgcctggcattatgcccagtacatgaccttatgggactttcctacttggcagtacatctacgtattagtcatcgctattaccatggtgatgcggttttggcagtacatcaatgggcgtggatagcggtttgactcacggggatttccaagtctccaccccattgacgtcaatgggagtttgttttggcaccaaaatcaacgggactttccaaaatgtcgtaacaactccgccccattgacgcaaatgggcggtaggcgtgtacggtgggaggtctatataagcagagctggtttagtgaaccgtattaaaggtttataccttcccaggtaacaaaccaaccaactttcgatctcttgtagatctgttctctaaacgaactttaaaatctgtgtggctgtcactcggctgcatgcttagtgcactcacgcagtataattaataactaattactgtcgttgacaggacacgagtaactcgtctatcttctgcaggctgcttacggtttcgtccgtgttgcagccgatcatcagcacatctaggtttcgtccgggtgtgaccgaaaggtaagatggagagccttgtccctggtttcaacgagaaaacacacgtccaactcagtttgcctgttttacaggttcgcgacgtgctcgtacgtggctttggagactccgtggaggaggtcttatcagaggcacgtcaacatcttaaagatggcacttgtggcttagtagaagttgaaaaaggcgttttgcctcaacttgaacagccctatgtgttcatcaaacgttcggatgctcgaactgcacctcatggtcatgttatggttgagctggtagcagaactcgaaggcattcagtacggtcgtagtggtgagacacttggtgtccttgtccctcatgtgggcgaaataccagtggcttaccgcaaggttcttcttcgtaagaacggtaataaaggagctggtggccatagttacggcgccgatctaaagtcatttgacttaggcgacgagcttggcactgatccttatgaagattttcaagaaaactggaacactaaacatagcagtggtgttacccgtgaactcatgcgtgagcttaacggaggggcatacactcgctatgtcgataacaacttctgtggccctgatggctaccctcttgagtgcattaaagaccttctagcacgtgctggtaaagcttcatgcactttgtccgaacaactggactttattgacactaagaggggtgtatactgctgccgtgaacatgagcatgaaattgcttggtacacggaacgttctgaaaagagctatgaattgcagacaccttttgaaattaaattggcaaagaaatttgacaccttcaatggggaatgtccaaattttgtatttcccttaaattccataatcaagactattcaaccaagggttgaaaagaaaaagcttgatggctttatgggtagaattcgatctgtctatccagttgcgtcaccaaatgaatgcaaccaaatgtgcctttcaactctcatgaagtgtgatcattgtggtgaaacttcatggcagacgggcgattttgttaaagccacttgcgaattttgtggcactgagaatttgactaaagaaggtgccactacttgtggttacttaccccaaaatgctgttgttaaaatttattgtccagcatgtcacaattcagaagtaggacctgagcatagtcttgccgaataccataatgaatctggcttgaaaaccattcttcgtaagggtggtcgcactattgcctttggaggctgtgtgttctcttatgttggttgccataacaagtgtgcctattgggtcccacgtgctagcgctaacataggttgtaaccatacaggtgttgttggagaaggttccgaaggtcttaatgacaaccttcttgaaatactccaaaaagagaaagtcaacatcaatattgttggtgactttaaacttaatgaagagatcgccattattttggcatctttttctgcttccacaagtgcttttgtggaaactgtgaaaggtttggattataaagcattcaaacaaattgttgaatcctgtggtaattttaaagttacaaaaggaaaagctaaaaaaggtgcctggaatattggtgaacagaaatcaatactgagtcctctttatgcatttgcatcagaggctgctcgtgttgtacgatcaattttctcccgcactcttgaaactgctcaaaattctgtgcgtgttttacagaaggccgctataacaatactagatggaatttcacagtattcactgagactcattgatgctatgatgttcacatctgatttggctactaacaatctagttgtaatggcctacattacaggtggtgttgttcagttgacttcgcagtggctaactaacatctttggcactgtttatgaaaaactcaaacccgtccttgattggcttgaagagaagtttaaggaaggtgtagagtttcttagagacggttgggaaattgttaaatttatctcaacctgtgcttgtgaaattgtcggtggacaaattgtcacctgtgcaaaggaaattaaggagagtgttcagacattctttaagcttgtaaataaatttttggctttgtgtgctgactctatcattattggtggagctaaacttaaagccttgaatttaggtgaaacatttgtcacgcactcaaagggattgtacagaaagtgtgttaaatccagagaagaaactggcctactcatgcctctaaaagccccaaaagaaattatcttcttagagggagaaacacttcccacagaagtgttaacagaggaagttgtcttgaaaactggtgatttacaaccattagaacaacctactagtgaagctgttgaagctccattggttggtacaccagtttgtattaacgggcttatgttgctcgaaatcaaagacacagaaaagtactgtgcccttgcacctaatatgatggtaacaaacaataccttcacactcaaaggcggtgcaccaacaaaggttacttttggtgatgacactgtgatagaagtgcaaggttacaagagtgtgaatatcacttttgaacttgatgaaaggattgataaagtacttaatgagaagtgctctgcctatacagttgaactcggtacagaagtaaatgagttcgcctgtgttgtggcagatgctgtcataaaaactttgcaaccagtatctgaattacttacaccactgggcattgatttagatgagtggagtatggctacatactacttatttgatgagtctggtgagtttaaattggcttcacatatgtattgttctttctaccctccagatgaggatgaagaagaaggtgattgtgaagaagaagagtttgagccatcaactcaatatgagtatggtactgaagatgattaccaaggtaaacctttggaatttggtgccacttctgctgctcttcaacctgaagaagagcaagaagaagattggttagatgatgatagtcaacaaactgttggtcaacaagacggcagtgaggacaatcagacaactactattcaaacaattgttgaggttcaacctcaattagagatggaacttacaccagttgttcagactattgaagtgaatagttttagtggttatttaaaacttactgacaatgtatacattaaaaatgcagacattgtggaagaagctaaaaaggtaaaaccaacagtggttgttaatgcagccaatgtttaccttaaacatggaggaggtgttgcaggagccttaaataaggctactaacaatgccatgcaagttgaatctgatgattacatagctactaatggaccacttaaagtgggtggtagttgtgttttaagcggacacaatcttgctaaacactgtcttcatgttgtcggcccaaatgttaacaaaggtgaagacattcaacttcttaagagtgcttatgaaaattttaatcagcacgaagttctacttgcaccattattatcagctggtatttttggtgctgaccctatacattctttaagagtttgtgtagatactgttcgcacaaatgtctacttagctgtctttgataaaaatctctatgacaaacttgtttcaagctttttggaaatgaagagtgaaaagcaagttgaacaaaagatcgctgagattcctaaagaggaagttaagccatttataactgaaagtaaaccttcagttgaacagagaaaacaagatgataagaaaatcaaagcttgtgttgaagaagttacaacaactctggaagaaactaagttcctcacagaaaacttgttactttatattgacattaatggcaatcttcatccagattctgccactcttgttagtgacattgacatcactttcttaaagaaagatgctccatatatagtgggtgatgttgttcaagagggtgttttaactgctgtggttatacctactaaaaaggctggtggcactactgaaatgctagcgaaagctttgagaaaagtgccaacagacaattatataaccacttacccgggtcagggtttaaatggttacactgtagaggaggcaaagacagtgcttaaaaagtgtaaaagtgccttttacattctaccatctattatctctaatgagaagcaagaaattcttggaactgtttcttggaatttgcgagaaatgcttgcacatgcagaagaaacacgcaaattaatgcctgtctgtgtggaaactaaagccatagtttcaactatacagcgtaaatataagggtattaaaatacaagagggtgtggttgattatggtgctagattttacttttacaccagtaaaacaactgtagcgtcacttatcaacacacttaacgatctaaatgaaactcttgttacaatgccacttggctatgtaacacatggcttaaatttggaagaagctgctcggtatatgagatctctcaaagtgccagctacagtttctgtttcttcacctgatgctgttacagcgtataatggttatcttacttcttcttctaaaacacctgaagaacattttattgaaaccatctcacttgctggttcctataaagattggtcctattctggacaatctacacaactaggtatagaatttcttaagagaggtgataaaagtgtatattacactagtaatcctaccacattccacctagatggtgaagttatcacctttgacaatcttaagacacttctttctttgagagaagtgaggactattaaggtgtttacaacagtagacaacattaacctccacacgcaagttgtggacatgtcaatgacatatggacaacagtttggtccaacttatttggatggagctgatgttactaaaataaaacctcataattcacatgaaggtaaaacattttatgttttacctaatgatgacactctacgtgttgaggcttttgagtactaccacacaactgatcctagttttctgggtaggtacatgtcagcattaaatcacactaaaaagtggaaatacccacaagttaatggtttaacttctattaaatgggcagataacaactgttatcttgccactgcattgttaacactccaacaaatagagttgaagtttaatccacctgctctacaagatgcttattacagagcaagggctggtgaagctgctaacttttgtgcacttatcttagcctactgtaataagacagtaggtgagttaggtgatgttagagaaacaatgagttacttgtttcaacatgccaatttagattcttgcaaaagagtcttgaacgtggtgtgtaaaacttgtggacaacagcagacaacccttaagggtgtagaagctgttatgtacatgggcacactttcttatgaacaatttaagaaaggtgttcagataccttgtacgtgtggtaaacaagctacaaaatatctagtacaacaggagtcaccttttgttatgatgtcagcaccacctgctcagtatgaacttaagcatggtacatttacttgtgctagtgagtacactggtaattaccagtgtggtcactataaacatataacttctaaagaaactttgtattgcatagacggtgctttacttacaaagtcctcagaatacaaaggtcctattacggatgttttctacaaagaaaacagttacacaacaaccataaaaccagttacttataaattggatggtgttgtttgtacagaaattgaccctaagttggacaattattataagaaagacaattcttatttcacagagcaaccaattgatcttgtaccaaaccaaccatatccaaacgcaagcttcgataattttaagtttgtatgtgataatatcaaatttgctgatgatttaaaccagttaactggttataagaaacctgcttcaagagagcttaaagttacatttttccctgacttaaatggtgatgtggtggctattgattataaacactacacaccctcttttaagaaaggagctaaattgttacataaacctattgtttggcatgttaacaatgcaactaataaagccacgtataaaccaaatacctggtgtatacgttgtctttggagcacaaaaccagttgaaacatcaaattcgtttgatgtactgaagtcagaggacgcgcagggaatggataatcttgcctgcgaagatctaaaaccagtctctgaagaagtagtggaaaatcctaccatacagaaagacgttcttgagtgtaatgtgaaaactaccgaagttgtaggagacattatacttaaaccagcaaataatagtttaaaaattacagaagaggttggccacacagatctaatggctgcttatgtagacaattctagtcttactattaagaaacctaatgaattatctagagtattaggtttgaaaacccttgctactcatggtttagctgctgttaatagtgtcccttgggatactatagctaattatgctaagccttttcttaacaaagttgttagtacaactactaacatagttacacggtgtttaaaccgtgtttgtactaattatatgccttatttctttactttattgctacaattgtgtacttttactagaagtacaaattctagaattaaagcatctatgccgactactatagcaaagaatactgttaagagtgtcggtaaattttgtctagaggcttcatttaattatttgaagtcacctaatttttctaaactgataaatattataatttggtttttactattaagtgtttgcctaggttctttaatctactcaaccgctgctttaggtgttttaatgtctaatttaggcatgccttcttactgtactggttacagagaaggctatttgaactctactaatgtcactattgcaacctactgtactggttctataccttgtagtgtttgtcttagtggtttagattctttagacacctatccttctttagaaactatacaaattaccatttcatcttttaaatgggatttaactgcttttggcttagttgcagagtggtttttggcatatattcttttcactaggtttttctatgtacttggattggctgcaatcatgcaattgtttttcagctattttgcagtacattttattagtaattcttggcttatgtggttaataattaatcttgtacaaatggccccgatttcagctatggttagaatgtacatcttctttgcatcattttattatgtatggaaaagttatgtgcatgttgtagacggttgtaattcatcaacttgtatgatgtgttacaaacgtaatagagcaacaagagtcgaatgtacaactattgttaatggtgttagaaggtccttttatgtctatgctaatggaggtaaaggcttttgcaaactacacaattggaattgtgttaattgtgatacattctgtgctggtagtacatttattagtgatgaagttgcgagagacttgtcactacagtttaaaagaccaataaatcctactgaccagtcttcttacatcgttgatagtgttacagtgaagaatggttccatccatctttactttgataaagctggtcaaaagacttatgaaagacattctctctctcattttgttaacttagacaacctgagagctaataacactaaaggttcattgcctattaatgttatagtttttgatggtaaatcaaaatgtgaagaatcatctgcaaaatcagcgtctgtttactacagtcagcttatgtgtcaacctatactgttactagatcaggcattagtgtctgatgttggtgatagtgcggaagttgcagttaaaatgtttgatgcttacgttaatacgttttcatcaacttttaacgtaccaatggaaaaactcaaaacactagttgcaactgcagaagctgaacttgcaaagaatgtgtccttagacaatgtcttatctacttttatttcagcagctcggcaagggtttgttgattcagatgtagaaactaaagatgttgttgaatgtcttaaattgtcacatcaatctgacatagaagttactggcgatagttgtaataactatatgctcacctataacaaagttgaaaacatgacaccccgtgaccttggtgcttgtattgactgtagtgcgcgtcatattaatgcgcaggtagcaaaaagtcacaacattgctttgatatggaacgttaaagatttcatgtcattgtctgaacaactacgaaaacaaatacgtagtgctgctaaaaagaataacttaccttttaagttgacatgtgcaactactagacaagttgttaatgttgtaacaacaaagatagcacttaagggtggtaaaattgttaataattggttgaagcagttaattaaagttacacttgtgttcctttttgttgctgctattttctatttaataacacctgttcatgtcatgtctaaacatactgacttttcaagtgaaatcataggatacaaggctattgatggtggtgtcactcgtgacatagcatctacagatacttgttttgctaacaaacatgctgattttgacacatggtttagccagcgtggtggtagttatactaatgacaaagcttgcccattgattgctgcagtcataacaagagaagtgggttttgtcgtgcctggtttgcctggcacgatattacgcacaactaatggtgactttttgcatttcttacctagagtttttagtgcagttggtaacatctgttacacaccatcaaaacttatagagtacactgactttgcaacatcagcttgtgttttggctgctgaatgtacaatttttaaagatgcttctggtaagccagtaccatattgttatgataccaatgtactagaaggttctgttgcttatgaaagtttacgccctgacacacgttatgtgctcatggatggctctattattcaatttcctaacacctaccttgaaggttctgttagagtggtaacaacttttgattctgagtactgtaggcacggcacttgtgaaagatcagaagctggtgtttgtgtatctactagtggtagatgggtacttaacaatgattattacagatctttaccaggagttttctgtggtgtagatgctgtaaatttacttactaatatgtttacaccactaattcaacctattggtgctttggacatatcagcatctatagtagctggtggtattgtagctatcgtagtaacatgccttgcctactattttatgaggtttagaagagcttttggtgaatacagtcatgtagttgcctttaatactttactattccttatgtcattcactgtactctgtttaacaccagtttactcattcttacctggtgtttattctgttatttacttgtacttgacattttatcttactaatgatgtttcttttttagcacatattcagtggatggttatgttcacacctttagtacctttctggataacaattgcttatatcatttgtatttccacaaagcatttctattggttctttagtaattacctaaagagacgtgtagtctttaatggtgtttcctttagtacttttgaagaagctgcgctgtgcacctttttgttaaataaagaaatgtatctaaagttgcgtagtgatgtgctattacctcttacgcaatataatagatacttagctctttataataagtacaagtattttagtggagcaatggatacaactagctacagagaagctgcttgttgtcatctcgcaaaggctctcaatgacttcagtaactcaggttctgatgttctttaccaaccaccacaaacctctatcacctcagctgttttgcagagtggttttagaaaaatggcattcccatctggtaaagttgagggttgtatggtacaagtaacttgtggtacaactacacttaacggtctttggcttgatgacgtagtttactgtccaagacatgtgatctgcacctctgaagacatgcttaaccctaattatgaagatttactcattcgtaagtctaatcataatttcttggtacaggctggtaatgttcaactcagggttattggacattctatgcaaaattgtgtacttaagcttaaggttgatacagccaatcctaagacacctaagtataagtttgttcgcattcaaccaggacagactttttcagtgttagcttgttacaatggttcaccatctggtgtttaccaatgtgctatgaggcccaatttcactattaagggttcattccttaatggttcatgtggtagtgttggttttaacatagattatgactgtgtctctttttgttacatgcaccatatggaattaccaactggagttcatgctggcacagacttagaaggtaacttttatggaccttttgttgacaggcaaacagcacaagcagctggtacggacacaactattacagttaatgttttagcttggttgtacgctgctgttataaatggagacaggtggtttctcaatcgatttaccacaactcttaatgactttaaccttgtggctatgaagtacaattatgaacctctaacacaagaccatgttgacatactaggacctctttctgctcaaactggaattgccgttttagatatgtgtgcttcattaaaagaattactgcaaaatggtatgaatggacgtaccatattgggtagtgctttattagaagatgaatttacaccttttgatgttgttagacaatgctcaggtgttactttccaaagtgcagtgaaaagaacaatcaagggtacacaccactggttgttactcacaattttgacttcacttttagttttagtccagagtactcaatggtctttgttcttttttttgtatgaaaatgcctttttaccttttgctatgggtattattgctatgtctgcttttgcaatgatgtttgtcaaacataagcatgcatttctctgtttgtttttgttaccttctcttgccactgtagcttattttaatatggtctatatgcctgctagttgggtgatgcgtattatgacatggttggatatggttgatactagtttgtctggttttaagctaaaagactgtgttatgtatgcatcagctgtagtgttactaatccttatgacagcaagaactgtgtatgatgatggtgctaggagagtgtggacacttatgaatgtcttgacactcgtttataaagtttattatggtaatgctttagatcaagccatttccatgtgggctcttataatctctgttacttctaactactcaggtgtagttacaactgtcatgtttttggccagaggtattgtttttatgtgtgttgagtattgccctattttcttcataactggtaatacacttcagtgtataatgctagtttattgtttcttaggctatttttgtacttgttactttggcctcttttgtttactcaaccgctactttagactgactcttggtgtttatgattacttagtttctacacaggagtttagatatatgaattcacagggactactcccacccaagaatagcatagatgccttcaaactcaacattaaattgttgggtgttggtggcaaaccttgtatcaaagtagccactgtacagtctaaaatgtcagatgtaaagtgcacatcagtagtcttactctcagttttgcaacaactcagagtagaatcatcatctaaattgtgggctcaatgtgtccagttacacaatgacattctcttagctaaagatactactgaagcctttgaaaaaatggtttcactactttctgttttgctttccatgcagggtgctgtagacataaacaagctttgtgaagaaatgctggacaacagggcaaccttacaagctatagcctcagagtttagttcccttccatcatatgcagcttttgctactgctcaagaagcttatgagcaggctgttgctaatggtgattctgaagttgttcttaaaaagttgaagaagtctttgaatgtggctaaatctgaatttgaccgtgatgcagccatgcaacgtaagttggaaaagatggctgatcaagctatgacccaaatgtataaacaggctagatctgaggacaagagggcaaaagttactagtgctatgcagacaatgcttttcactatgcttagaaagttggataatgatgcactcaacaacattatcaacaatgcaagagatggttgtgttcccttgaacataatacctcttacaacagcagccaaactaatggttgtcataccagactataacacatataaaaatacgtgtgatggtacaacatttacttatgcatcagcattgtgggaaatccaacaggttgtagatgcagatagtaaaattgttcaacttagtgaaattagtatggacaattcacctaatttagcatggcctcttattgtaacagctttaagggccaattctgctgtcaaattacagaataatgagcttagtcctgttgcactacgacagatgtcttgtgctgccggtactacacaaactgcttgcactgatgacaatgcgttagcttactacaacacaacaaagggaggtaggtttgtacttgcactgttatccgatttacaggatttgaaatgggctagattccctaagagtgatggaactggtactatctatacagaactggaaccaccttgtaggtttgttacagacacacctaaaggtcctaaagtgaagtatttatactttattaaaggattaaacaacctaaatagaggtatggtacttggtagtttagctgccacagtacgtctacaagctggtaatgcaacagaagtgcctgccaattcaactgtattatctttctgtgcttttgctgtagatgctgctaaagcttacaaagattatctagctagtgggggacaaccaatcactaattgtgttaagatgttgtgtacacacactggtactggtcaggcaataacagttacaccggaagccaatatggatcaagaatcctttggtggtgcatcgtgttgtctgtactgccgttgccacatagatcatccaaatcctaaaggattttgtgacttaaaaggtaagtatgtacaaatacctacaacttgtgctaatgaccctgtgggttttacacttaaaaacacagtctgtaccgtctgcggtatgtggaaaggttatggctgtagttgtgatcaactccgcgaacccatgcttcagtcagctgatgcacaatcgtttttaaacgggtttgcggtgtaagtgcagcccgtcttacaccgtgcggcacaggcactagtactgatgtcgtatacagggcttttgacatctacaatgataaagtagctggttttgctaaattcctaaaaactaattgttgtcgcttccaagaaaaggacgaagatgacaatttaattgattcttactttgtagttaagagacacactttctctaactaccaacatgaagaaacaatttataatttacttaaggattgtccagctgttgctaaacatgacttctttaagtttagaatagacggtgacatggtaccacatatatcacgtcaacgtcttactaaatacacaatggcagacctcgtctatgctttaaggcattttgatgaaggtaattgtgacacattaaaagaaatacttgtcacatacaattgttgtgatgatgattatttcaataaaaaggactggtatgattttgtagaaaacccagatatattacgcgtatacgccaacttaggtgaacgtgtacgccaagctttgttaaaaacagtacaattctgtgatgccatgcgaaatgctggtattgttggtgtactgacattagataatcaagatctcaatggtaactggtatgatttcggtgatttcatacaaaccacgccaggtagtggagttcctgttgtagattcttattattcattgttaatgcctatattaaccttgaccagggctttaactgcagagtcacatgttgacactgacttaacaaagccttacattaagtgggatttgttaaaatatgacttcacggaagagaggttaaaactctttgaccgttattttaaatattgggatcagacataccacccaaattgtgttaactgtttggatgacagatgcattctgcattgtgcaaactttaatgttttattctctacagtgttcccacctacaagttttggaccactagtgagaaaaatatttgttgatggtgttccatttgtagtttcaactggataccacttcagagagctaggtgttgtacataatcaggatgtaaacttacatagctctagacttagttttaaggaattacttgtgtatgctgctgaccctgctatgcacgctgcttctggtaatctattactagataaacgcactacgtgcttttcagtagctgcacttactaacaatgttgcttttcaaactgtcaaacccggtaattttaacaaagacttctatgactttgctgtgtctaagggtttctttaaggaaggaagttctgttgaattaaaacacttcttctttgctcaggatggtaatgctgctatcagcgattatgactactatcgttataatctaccaacaatgtgtgatatcagacaactactatttgtagttgaagttgttgataagtactttgattgttacgatggtggctgtattaatgctaaccaagtcatcgtcaacaacctagacaaatcagctggttttccatttaataaatggggtaaggctagactttattatgattcaatgagttatgaggatcaagatgcacttttcgcatatacaaaacgtaatgtcatccctactataactcaaatgaatcttaagtatgccattagtgcaaagaatagagctcgcaccgtagctggtgtctctatctgtagtactatgaccaatagacagtttcatcaaaaattattgaaatcaatagccgccactagaggagctactgtagtaattggaacaagcaaattctatggtggttggcacaacatgttaaaaactgtttatagtgatgtagaaaaccctcaccttatgggttgggattatcctaaatgtgatagagccatgcctaacatgcttagaattatggcctcacttgttcttgctcgcaaacatacaacgtgttgtagcttgtcacaccgtttctatagattagctaatgagtgtgctcaagtattgagtgaaatggtcatgtgtggcggttcactatatgttaaaccaggtggaacctcatcaggagatgccacaactgcttatgctaatagtgtttttaacatttgtcaagctgtcacggccaatgttaatgcacttttatctactgatggtaacaaaattgccgataagtatgtccgcaatttacaacacagactttatgagtgtctctatagaaatagagatgttgacacagactttgtgaatgagttttacgcatatttgcgtaaacatttctcaatgatgatactctctgacgatgctgttgtgtgtttcaatagcacttatgcatctcaaggtctagtggctagcataaagaactttaagtcagttctttattatcaaaacaatgtttttatgtctgaagcaaaatgttggactgagactgaccttactaaaggacctcatgaattttgctctcaacatacaatgctagttaaacagggtgatgattatgtgtaccttccttacccagatccatcaagaatcctaggggccggctgttttgtagatgatatcgtaaaaacagatggtacacttatgattgaacggttcgtgtctttagctatagatgcttacccacttactaaacatcctaatcaggagtatgctgatgtctttcatttgtacttacaatacataagaaagctacatgatgagttaacaggacacatgttagacatgtattctgttatgcttactaatgataacacttcaaggtattgggaacctgagttttatgaggctatgtacacaccgcatacagtcttacaggctgttggggcttgtgttctttgcaattcacagacttcattaagatgtggtgcttgcatacgtagaccattcttatgttgtaaatgctgttacgaccatgtcatatcaacatcacataaattagtcttgtctgttaatccgtatgtttgcaatgctccaggttgtgatgtcacagatgtgactcaactttacttaggaggtatgagctattattgtaaatcacataaaccacccattagttttccattgtgtgctaatggacaagtttttggtttatataaaaatacatgtgttggtagcgataatgttactgactttaatgcaattgcaacatgtgactggacaaatgctggtgattacattttagctaacacctgtactgaaagactcaagctttttgcagcagaaacgctcaaagctactgaggagacatttaaactgtcttatggtattgctactgtacgtgaagtgctgtctgacagagaattacatctttcatgggaagttggtaaacctagaccaccacttaaccgaaattatgtctttactggttatcgtgtaactaaaaacagtaaagtacaaataggagagtacacctttgaaaaaggtgactatggtgatgctgttgtttaccgaggtacaacaacttacaaattaaatgttggtgattattttgtgctgacatcacatacagtaatgccattaagtgcacctacactagtgccacaagagcactatgttagaattactggcttatacccaacactcaatatctcagatgagttttctagcaatgttgcaaattatcaaaaggttggtatgcaaaagtattctacactccagggaccacctggtactggtaagagtcattttgctattggcctagctctctactacccttctgctcgcatagtgtatacagcttgctctcatgccgctgttgatgcactatgtgagaaggcattaaaatatttgcctatagataaatgtagtagaattatacctgcacgtgctcgtgtagagtgttttgataaattcaaagtgaattcaacattagaacagtatgtcttttgtactgtaaatgcattgcctgagacgacagcagatatagttgtctttgatgaaatttcaatggccacaaattatgatttgagtgttgtcaatgccagattacgtgctaagcactatgtgtacattggcgaccctgctcaattacctgcaccacgcacattgctaactaagggcacactagaaccagaatatttcaattcagtgtgtagacttatgaaaactataggtccagacatgttcctcggaacttgtcggcgttgtcctgctgaaattgttgacactgtgagtgctttggtttatgataataagcttaaagcacataaagacaaatcagctcaatgctttaaaatgttttataagggtgttatcacgcatgatgtttcatctgcaattaacaggccacaaataggcgtggtaagagaattccttacacgtaaccctgcttggagaaaagctgtctttatttcaccttataattcacagaatgctgtagcctcaaagattttgggactaccaactcaaactgttgattcatcacagggctcagaatatgactatgtcatattcactcaaaccactgaaacagctcactcttgtaatgtaaacagatttaatgttgctattaccagagcaaaagtaggcatactttgcataatgtctgatagagacctttatgacaagttgcaatttacaagtcttgaaattccacgtaggaatgtggcaactttacaagctgaaaatgtaacaggactctttaaagattgtagtaaggtaatcactgggttacatcctacacaggcacctacacacctcagtgttgacactaaattcaaaactgaaggtttatgtgttgacatacctggcatacctaaggacatgacctatagaagactcatctctatgatgggttttaaaatgaattatcaagttaatggttaccctaacatgtttatcacccgcgaagaagctataagacatgtacgtgcatggattggcttcgatgtcgaggggtgtcatgctactagagaagctgttggtaccaatttacctttacagctaggtttttctacaggtgttaacctagttgctgtacctacaggttatgttgatacacctaataatacagatttttccagagttagtgctaaaccaccgcctggagatcaatttaaacacctcataccacttatgtacaaaggacttccttggaatgtagtgcgtataaagattgtacaaatgttaagtgacacacttaaaaatctctctgacagagtcgtatttgtcttatgggcacatggctttgagttgacatctatgaagtattttgtgaaaataggacctgagcgcacctgttgtctatgtgatagacgtgccacatgcttttccactgcttcagacacttatgcctgttggcatcattctattggatttgattacgtctataatccgtttatgattgatgttcaacaatggggttttacaggtaacctacaaagcaaccatgatctgtattgtcaagtccatggtaatgcacatgtagctagttgtgatgcaatcatgactaggtgtctagctgtccacgagtgctttgttaagcgtgttgactggactattgaatatcctataattggtgatgaactgaagattaatgcggcttgtagaaaggttcaacacatggttgttaaagctgcattattagcagacaaattcccagttcttcacgacattggtaaccctaaagctattaagtgtgtacctcaagctgatgtagaatggaagttctatgatgcacagccttgtagtgacaaagcttataaaatagaagaattattctattcttatgccacacattctgacaaattcacagatggtgtatgcctattttggaattgcaatgtcgatagatatcctgctaattccattgtttgtagatttgacactagagtgctatctaaccttaacttgcctggttgtgatggtggcagtttgtatgtaaataaacatgcattccacacaccagcttttgataaaagtgcttttgttaatttaaaacaattaccatttttctattactctgacagtccatgtgagtctcatggaaaacaagtagtgtcagatatagattatgtaccactaaagtctgctacgtgtataacacgttgcaatttaggtggtgctgtctgtagacatcatgctaatgagtacagattgtatctcgatgcttataacatgatgatctcagctggctttagcttgtgggtttacaaacaatttgatacttataacctctggaacacttttacaagacttcagagtttagaaaatgtggcttttaatgttgtaaataagggacactttgatggacaacagggtgaagtaccagtttctatcattaataacactgtttacacaaaagttgatggtgttgatgtagaattgtttgaaaataaaacaacattacctgttaatgtagcatttgagctttgggctaagcgcaacattaaaccagtaccagaggtgaaaatactcaataatttgggtgtggacattgctgctaatactgtgatctgggactacaaaagagatgctccagcacatatatctactattggtgtttgttctatgactgacatagccaagaaaccaactgaaacgatttgtgcaccactcactgtcttttttgatggtagagttgatggtcaagtagacttatttagaaatgcccgtaatggtgttcttattacagaaggtagtgttaaaggtttacaaccatctgtaggtcccaaacaagctagtcttaatggagtcacattaattggagaagccgtaaaaacacagttcaattattataagaaagttgatggtgttgtccaacaattacctgaaacttactttactcagagtagaaatttacaagaatttaaacccaggagtcaaatggaaattgatttcttagaattagctatggatgaattcattgaacggtataaattagaaggctatgccttcgaacatatcgtttatggagattttagtcatagtcagttaggtggtttacatctactgattggactagctaaacgttttaaggaatcaccttttgaattagaagattttattcctatggacagtacagttaaaaactatttcataacagatgcgcaaacaggttcatctaagtgtgtgtgttctgttattgatttattacttgatgattttgttgaaataataaaatcccaagatttatctgtagtttctaaggttgtcaaagtgactattgactatacagaaatttcatttatgctttggtgtaaagatggccatgtagaaacattttacccaaaattacaatctagtcaagcgtggcaaccgggtgttgctatgcctaatctttacaaaatgcaaagaatgctattagaaaagtgtgaccttcaaaattatggtgatagtgcaacattacctaaaggcataatgatgaatgtcgcaaaatatactcaactgtgtcaatatttaaacacattaacattagctgtaccctataatatgagagttatacattttggtgctggttctgataaaggagttgcaccaggtacagctgttttaagacagtggttgcctacgggtacgctgcttgtcgattcagatcttaatgactttgtctctgatgcagattcaactttgattggtgattgtgcaactgtacatacagctaataaatgggatctcattattagtgatatgtacgaccctaagactaaaaatgttacaaaagaaaatgactctaaagagggttttttcacttacatttgtgggtttatacaacaaaagctagctcttggaggttccgtggctataaagataacagaacattcttggaatgctgatctttataagctcatgggacacttcgcatggtggacagcctttgttactaatgtgaatgcgtcatcatctgaagcatttttaattggatgtaattatcttggcaaaccacgcgaacaaatagatggttatgtcatgcatgcaaattacatattttggaggaatacaaatccaattcagttgtcttcctattctttatttgacatgagtaaatttccccttaaattaaggggtactgctgttatgtctttaaaagaaggtcaaatcaatgatatgattttatctcttcttagtaaaggtagacttataattagagaaaacaacagagttgttatttctagtgatgttcttgttaacaactaaacgaacaatgtttgtttttcttgttttattgccactagtctctagtcagtgtgttaatcttacaaccagaactcaattaccccctgcatacactaattctttcacacgtggtgtttattaccctgacaaagttttcagatcctcagttttacattcaactcaggacttgttcttacctttcttttccaatgttacttggttccatgctatacatgtctctgggaccaatggtactaagaggtttgataaccctgtcctaccatttaatgatggtgtttattttgcttccactgagaagtctaacataataagaggctggatttttggtactactttagattcgaagacccagtccctacttattgttaataacgctactaatgttgttattaaagtctgtgaatttcaattttgtaatgatccatttttgggtgtttattaccacaaaaacaacaaaagttggatggaaagtgagttcagagtttattctagtgcgaataattgcacttttgaatatgtctctcagccttttcttatggaccttgaaggaaaacagggtaatttcaaaaatcttagggaatttgtgtttaagaatattgatggttattttaaaatatattctaagcacacgcctattaatttagtgcgtgatctcccccagggtttttcggctttagaaccattggtagatttgccaataggtattaacatcactaggtttcaaactttacttgctttacatagaagttatttgactcctggtgattcttcttcaggttggacagctggtgctgcagcttattatgtgggttatcttcaacctaggacttttctattaaaatataatgaaaatggaaccattacagatgctgtagactgtgcacttgaccctctctcagaaacaaagtgtacgttgaaatccttcactgtagaaaaaggaatctatcaaacttctaactttagagtccaaccaacagaatctattgttagatttcctaatattacaaacttgtgcccttttggtgaagtttttaacgccaccagatttgcatctgtttatgcttggaacaggaagagaatcagcaactgtgttgctgattattctgtcctatataattccgcatcattttccacttttaagtgttatggagtgtctcctactaaattaaatgatctctgctttactaatgtctatgcagattcatttgtaattagaggtgatgaagtcagacaaatcgctccagggcaaactggaaagattgctgattataattataaattaccagatgattttacaggctgcgttatagcttggaattctaacaatcttgattctaaggttggtggtaattataattacctgtatagattgtttaggaagtctaatctcaaaccttttgagagagatatttcaactgaaatctatcaggccggtagcacaccttgtaatggtgttgaaggttttaattgttactttcctttacaatcatatggtttccaacccactaatggtgttggttaccaaccatacagagtagtagtactttcttttgaacttctacatgcaccagcaactgtttgtggacctaaaaagtctactaatttggttaaaaacaaatgtgtcaatttcaacttcaatggtttaacaggcacaggtgttcttactgagtctaacaaaaagtttctgcctttccaacaatttggcagagacattgctgacactactgatgctgtccgtgatccacagacacttgagattcttgacattacaccatgttcttttggtggtgtcagtgttataacaccaggaacaaatacttctaaccaggttgctgttctttatcaggatgttaactgcacagaagtccctgttgctattcatgcagatcaacttactcctacttggcgtgtttattctacaggttctaatgtttttcaaacacgtgcaggctgtttaataggggctgaacatgtcaacaactcatatgagtgtgacatacccattggtgcaggtatatgcgctagttatcagactcagactaattctcctcggcgggcacgtagtgtagctagtcaatccatcattgcctacactatgtcacttggtgcagaaaattcagttgcttactctaataactctattgccatacccacaaattttactattagtgttaccacagaaattctaccagtgtctatgaccaagacatcagtagattgtacaatgtacatttgtggtgattcaactgaatgcagcaatcttttgttgcaatatggcagtttttgtacacaattaaaccgtgctttaactggaatagctgttgaacaagacaaaaacacccaagaagtttttgcacaagtcaaacaaatttacaaaacaccaccaattaaagattttggtggttttaatttttcacaaatattaccagatccatcaaaaccaagcaagaggtcatttattgaagatctacttttcaacaaagtgacacttgcagatgctggcttcatcaaacaatatggtgattgccttggtgatattgctgctagagacctcatttgtgcacaaaagtttaacggccttactgttttgccacctttgctcacagatgaaatgattgctcaatacacttctgcactgttagcgggtacaatcacttctggttggacctttggtgcaggtgctgcattacaaataccatttgctatgcaaatggcttataggtttaatggtattggagttacacagaatgttctctatgagaaccaaaaattgattgccaaccaatttaatagtgctattggcaaaattcaagactcactttcttccacagcaagtgcacttggaaaacttcaagatgtggtcaaccaaaatgcacaagctttaaacacgcttgttaaacaacttagctccaattttggtgcaatttcaagtgttttaaatgatatcctttcacgtcttgacaaagttgaggctgaagtgcaaattgataggttgatcacaggcagacttcaaagtttgcagacatatgtgactcaacaattaattagagctgcagaaatcagagcttctgctaatcttgctgctactaaaatgtcagagtgtgtacttggacaatcaaaaagagttgatttttgtggaaagggctatcatcttatgtccttccctcagtcagcacctcatggtgtagtcttcttgcatgtgacttatgtccctgcacaagaaaagaacttcacaactgctcctgccatttgtcatgatggaaaagcacactttcctcgtgaaggtgtctttgtttcaaatggcacacactggtttgtaacacaaaggaatttttatgaaccacaaatcattactacagacaacacatttgtgtctggtaactgtgatgttgtaataggaattgtcaacaacacagtttatgatcctttgcaacctgaattagactcattcaaggaggagttagataaatattttaagaatcatacatcaccagatgttgatttaggtgacatctctggcattaatgcttcagttgtaaacattcaaaaagaaattgaccgcctcaatgaggttgccaagaatttaaatgaatctctcatcgatctccaagaacttggaaagtatgagcagtatataaaatggccatggtacatttggctaggttttatagctggcttgattgccatagtaatggtgacaattatgctttgctgtatgaccagttgctgtagttgtctcaagggctgttgttcttgtggatcctgctgcaaatttgatgaagacgactctgagccagtgctcaaaggagtcaaattacattacacataaacgaacttatggatttgtttatgagaatcttcacaattggaactgtaactttgaagcaaggtgaaatcaaggatgctactccttcagattttgttcgcgctactgcaacgataccgatacaagcctcactccctttcggatggcttattgttggcgttgcacttcttgctgtttttcagagcgcttccaaaatcataaccctcaaaaagagatggcaactagcactctccaagggtgttcactttgtttgcaacttgctgttgttgtttgtaacagtttactcacaccttttgctcgttgctgctggccttgaagccccttttctctatctttatgctttagtctacttcttgcagagtataaactttgtaagaataataatgaggctttggctttgctggaaatgccgttccaaaaacccattactttatgatgccaactattttctttgctggcatactaattgttacgactattgtataccttacaatagtgtaacttcttcaattgtcattacttcaggtgatggcacaacaagtcctatttctgaacatgactaccagattggtggttatactgaaaaatgggaatctggagtaaaagactgtgttgtattacacagttacttcacttcagactattaccagctgtactcaactcaattgagtacagacactggtgttgaacatgttaccttcttcatctacaataaaattgttgatgagcctgaagaacatgtccaaattcacacaatcgacggttcatccggagttgttaatccagtaatggaaccaatttatgatgaaccgacgacgactactagcgtgcctttgtaagcacaagctgatgagtacgaacttatgtactcattcgtttcggaagagacaggtacgttaatagttaatagcgtacttctttttcttgctttcgtggtattcttgctagttacactagccatccttactgcgcttcgattgtgtgcgtactgctgcaatattgttaacgtgagtcttgtaaaaccttctttttacgtttactctcgtgttaaaaatctgaattcttctagagttcctgatcttctggtctaaacgaactaaatattatattagtttttctgtttggaactttaattttagccatggcagattccaacggtactattaccgttgaagagcttaaaaagctccttgaacaatggaacctagtaataggtttcctattccttacatggatttgtcttctacaatttgcctatgccaacaggaataggtttttgtatataattaagttaattttcctctggctgttatggccagtaactttagcttgttttgtgcttgctgctgtttacagaataaattggatcaccggtggaattgctatcgcaatggcttgtcttgtaggcttgatgtggctcagctacttcattgcttctttcagactgtttgcgcgtacgcgatccatgtggtcattcaatccagaaactaacattcttctcaacgtgccactccatggcactattctgaccagaccgcttctagaaagtgaactcgtaatcggagctgtgatccttcgtggacatcttcgtattgctggacaccatctaggacgctgtgacatcaaggacctgcctaaagaaatcactgttgctacatcacgaacgctttcttattacaaattgggagcttcgcagcgtgtagcaggtgactcaggttttgctgcatacagtcgctacaggattggcaactataaattaaacacagaccattccagtagcagtgacaatattgctttgcttgtacagtaagtgacaacagatgtttcatctcgttgactttcaggttactatagcagagatattactaattattatgaggacttttaaagtttccatttggaatcttgattacatcataaacctcataattaaaaatttatctaagtcactaactgagaataaatattctcaattagatgaagagcaaccaatggagattgattaaacgaacatgaaaattattcttttcttggcactgataacactcgctacttgtgagctttatcactaccaagagtgtgttagaggtacaacagtacttttaaaagaaccttgctcttctggaacatacgagggcaattcaccatttcatcctctagctgataacaaatttgcactgacttgctttagcactcaatttgcttttgcttgtcctgacggcgtaaaacacgtctatcagttacgtgccagatcagtttcacctaaactgttcatcagacaagaggaagttcaagaactttactctccaatttttcttattgttgcggcaatagtgtttataacactttgcttcacactcaaaagaaagacagaatgattgaactttcattaattgacttctatttgtgctttttagcctttctgctattccttgttttaattatgcttattatcttttggttctcacttgaactgcaagatcataatgaaacttgtcacgcctaaacgaacatgaaatttcttgttttcttaggaatcatcacaactgtagctgcatttcaccaagaatgtagtttacagtcatgtactcaacatcaaccatatgtagttgatgacccgtgtcctattcacttctattctaaatggtatattagagtaggagctagaaaatcagcacctttaattgaattgtgcgtggatgaggctggttctaaatcacccattcagtacatcgatatcggtaattatacagtttcctgtttaccttttacaattaattgccaggaacctaaattgggtagtcttgtagtgcgttgttcgttctatgaagactttttagagtatcatgacgttcgtgttgttttagatttcatctaaacgaacaaactaaaatgtctgataatggaccccaaaatcagcgaaatgcaccccgcattacgtttggtggaccctcagattcaactggcagtaaccagaatggagaacgcagtggggcgcgatcaaaacaacgtcggccccaaggtttacccaataatactgcgtcttggttcaccgctctcactcaacatggcaaggaagaccttaaattccctcgaggacaaggcgttccaattaacaccaatagcagtccagatgaccaaattggctactaccgaagagctaccagacgaattcgtggtggtgacggtaaaatgaaagatctcagtccaagatggtatttctactacctaggaactgggccagaagctggacttccctatggtgctaacaaagacggcatcatatgggttgcaactgagggagccttgaatacaccaaaagatcacattggcacccgcaatcctgctaacaatgctgcaatcgtgctacaacttcctcaaggaacaacattgccaaaaggcttctacgcagaagggagcagaggcggcagtcaagcctcttctcgttcctcatcacgtagtcgcaacagttcaagaaattcaactccaggcagcagtaggggaacttctcctgctagaatggctggcaatggcggtgatgctgctcttgctttgctgctgcttgacagattgaaccagcttgagagcaaaatgtctggtaaaggccaacaacaacaaggccaaactgtcactaagaaatctgctgctgaggcttctaagaagcctcggcaaaaacgtactgccactaaagcatacaatgtaacacaagctttcggcagacgtggtccagaacaaacccaaggaaattttggggaccaggaactaatcagacaaggaactgattacaaacattggccgcaaattgcacaatttgcccccagcgcttcagcgttcttcggaatgtcgcgcattggcatggaagtcacaccttcgggaacgtggttgacctacacaggtgccatcaaattggatgacaaagatccaaatttcaaagatcaagtcattttgctgaataagcatattgacgcatacaaaacattcccaccaacagagcctaaaaaggacaaaaagaagaaggctgatgaaactcaagccttaccgcagagacagaagaaacagcaaactgtgactcttcttcctgctgcagatttggatgatttctccaaacaattgcaacaatccatgagcagtgctgactcaactcaggcctaaactcatgcagaccacacaaggcagatgggctatataaacgttttcgcttttccgtttacgatatatagtctactcttgtgcagaatgaattctcgtaactacatagcacaagtagatgtagttaactttaatctcacatagcaatctttaatcagtgtgtaacattagggaggacttgaaagagccaccacattttcaccgaggccacgcggagtacgatcgagtgtacagtgaacaatgctagggagagctgcctatatggaagagccctaatgtgtaaaattaattttagtagtgctatccccatgtgattttaatagcttcttaggagaatgacaaaaaaaaaaaaaaaaaaaaaaaaaaaaaaaaaaaaaaaaaaaaaaaaaaaaaaaaaaagggtcggcatggcatctccacctcctcgcggtccgacctgggcatccgaaggaggacgcacgtccactcggatggctaagggagcagcacactggcggccgttactagggccgcgcccttcccaacagttgcgcagcctgaatggcgaatggagatccaatttttaagtgtataatgtgttaaactactgattctaattgtttgtgtattttagattcacagtcccaaggctcatttcaggcccctcagtcctcacagtctgttcatgatcataatcagccataccacatttgtagaggttttacttgctttaaaaaacctcccacacctccccctgaacctgaaacataaaatgaatgcaattgttgttgttaacttgtttattgcagcttataatggttacaaataaagcaatagcatcacaaatttcacaaataaagcatttttttcactgcattctagttgtggtttgtccaaactcatcaatgtatcttaaagcttgagtattctatagtctcacctaaatagcttggcgtaatcatggtcatagctgtttcctgtgtgaaattgttatccgctcacaattccacacaacatacgagccggaagcataaagtgtaaagcctggggtgcctaatgagtgagctaactcacattaattgcgttgcgctcactgcccgctttccagtcgggaaacctgtcgtgccagctgcattaatgaatcggccaacgcgaaccccttgcggccgcccgggccgtcgaccaattctcatgtttgacagcttatcatcgaatttctgccattcatccgcttattatcacttattcaggcgtagcaaccaggcgtttaagggcaccaataactgccttaaaaaaattacgccccgccctgccactcatcgcagtactgttgtaattcattaagcattctgccgacatggaagccatcacaaacggcatgatgaacctgaatcgccagcggcatcagcaccttgtcgccttgcgtataatatttgcccatggtgaaaacgggggcgaagaagttgtccatattggccacgtttaaatcaaaactggtgaaactcacccagggattggctgagacgaaaaacatattctcaataaaccctttagggaaataggccaggttttcaccgtaacacgccacatcttgcgaatatatgtgtagaaactgccggaaatcgtcgtggtattcactccagagcgatgaaaacgtttcagtttgctcatggaaaacggtgtaacaagggtgaacactatcccatatcaccagctcaccgtctttcattgccatacgaaattccggatgagcattcatcaggcgggcaagaatgtgaataaaggccggataaaacttgtgcttatttttctttacggtctttaaaaaggccgtaatatccagctgaacggtctggttataggtacattgagcaactgactgaaatgcctcaaaatgttctttacgatgccattgggatatatcaacggtggtatatccagtgatttttttctccattttagcttccttagctcctgaaaatctcgataactcaaaaaatacgcccggtagtgatcttatttcattatggtgaaagttggaacctcttacgtgccgatcaacgtctcattttcgccaaaagttggcccagggcttcccggtatcaacagggacaccaggatttatttattctgcgaagtgatcttccgtcacaggtatttattcgcgataagctcatggagcggcgtaaccgtcgcacaggaaggacagagaaagcgcggatctgggaagtgacggacagaacggtcaggacctggattggggaggcggttgccgccgctgctgctgacggtgtgacgttctctgttccggtcacaccacatacgttccgccattcctatgcgatgcacatgctgtatgccggtataccgctgaaagttctgcaaagcctgatgggacataagtccatcagttcaacggaagtctacacgaaggtttttgcgctggatgtggctgcccggcaccgggtgcagtttgcgatgccggagtctgatgcggttgcgatgctgaaacaattatcctgagaataaatgccttggcctttatatggaaatgtggaactgagtggatatgctgtttttgtctgttaaacagagaagctggctgttatccactgagaagcgaacgaaacagtcgggaaaatctcccattatcgtagagatccgcattattaatctcaggagcctgtgtagcgtttataggaagtagtgttctgtcatgatgcctgcaagcggtaacgaaaacgatttgaatatgccttcaggaacaatagaaatcttcgtgcggtgttacgttgaagtggagcggattatgtcagcaatggacagaacaacctaatgaacacagaaccatgatgtggtctgtccttttacagccagtagtgctcgccgcagtcgagcgacagggcgaagccctcggctggttgccctcgccgctgggctggcggccgtctatggccctgcaaacgcgccagaaacgccgtcgaagccgtgtgcgagacaccgcggccggccgccggcgttgtggatacctcgcggaaaacttggccctcactgacagatgaggggcggacgttgacacttgaggggccgactcacccggcgcggcgttgacagatgaggggcaggctcgatttcggccggcgacgtggagctggccagcctcgcaaatcggcgaaaacgcctgattttacgcgagtttcccacagatgatgtggacaagcctggggataagtgccctgcggtattgacacttgaggggcgcgactactgacagatgaggggcgcgatccttgacacttgaggggcagagtgctgacagatgaggggcgcacctattgacatttgaggggctgtccacaggcagaaaatccagcatttgcaagggtttccgcccgtttttcggccaccgctaacctgtcttttaacctgcttttaaaccaatatttataaaccttgtttttaaccagggctgcgccctgtgcgcgtgaccgcgcacgccgaaggggggtgcccccccttctcgaaccctcccggtcgagtgagcgaggaagcaccagggaacagcacttatatattctgcttacacacgatgcctgaaaaaacttcccttggggttatccacttatccacggggatatttttataattattttttttatagtttttagatcttcttttttagagcgccttgtaggcctttatccatgctggttctagagaaggtgttgtgacaaattgccctttcagtgtgacaaatcaccctcaaatgacagtcctgtctgtgacaaattgcccttaaccctgtgacaaattgccctcagaagaagctgttttttcacaaagttatccctgcttattgactcttttttatttagtgtgacaatctaaaaacttgtcacacttcacatggatctgtcatggcggaaacagcggttatcaatcacaagaaacgtaaaaatagcccgcgaatcgtccagtcaaacgacctcactgaggcggcatatagtctctcccgggatcaaaaacgtatgctgtatctgttcgttgaccagatcagaaaatctgatggcaccctacaggaacatgacggtatctgcgagatccatgttgctaaatatgctgaaatattcggattgacctctgcggaagccagtaaggatatacggcaggcattgaagagtttcgcggggaaggaagtggttttttatcgccctgaagaggatgccggcgatgaaaaaggctatgaatcttttccttggtttatcaaacgtgcgcacagtccatccagagggctttacagtgtacatatcaacccatatctcattcccttctttatcgggttacagaaccggtttacgcagtttcggcttagtgaaacaaaagaaatcaccaatccgtatgccatgcgtttatacgaatccctgtgtcagtatcgtaagccggatggctcaggcatcgtctctctgaaaatcgactggatcatagagcgttaccagctgcctcaaagttaccagcgtatgcctgacttccgccgccgcttcctgcaggtctgtgttaatgagatcaacagcagaactccaatgcgcctctcatacattgagaaaaagaaaggccgccagacgactcatatcgtattttccttccgcgatatcacttccatgacgacaggatagtctgagggttatctgtcacagatttgagggtggttcgtcacatttgttctgacctactgagggtaatttgtcacagttttgctgtttccttcagcctgcatggattttctcatactttttgaactgtaatttttaaggaagccaaatttgagggcagtttgtcacagttgatttccttctctttcccttcgtcatgtgacctgatatcgggggttagttcgtcatcattgatgagggttgattatcacagtttattactctgaattggctatccgcgtgtgtacctctacctggagtttttcccacggtggatatttcttcttgcgctgagcgtaagagctatctgacagaacagttcttctttgcttcctcgccagttcgctcgctatgctcggttacacggctgcggcg

SEQ ID NO: 33 - DNA, 2725 bp, Artificial Sequence
  Codon deoptimized nucleotide sequence of sub-fragment 2A. Based on SARS-CoV-2.
gggtcccgcgtgcgagtgcgaacataggttgtaatcatacgggtgtagtaggtgaaggttcggaaggtctaaatgataatctactagaaatactacaaaaagaaaaagtaaatataaatatagtaggtgattttaaactaaatgaagaaatagcgataatattagcgtcgttttcggcgtcgacgagtgcgtttgtagaaacggtaaaaggtttagattataaagcgtttaaacaaatagtagaatcgtgtggtaattttaaagtgacgaaaggtaaagcgaaaaaaggtgcgtggaatataggtgaacaaaaatcgatactaagtccgctatatgcgtttgcgtcggaagcggcgcgtgtagtacgttcgatattttcgcgtacgctagaaacggcgcaaaattcggtacgtgtattacaaaaagcggcgataacgatactagatggtatatcgcaatattcgctacgtctaatagatgcgatgatgtttacgtcggatttagcgacgaataatctagtagtaatggcgtatataacgggtggtgtagtacaattaacgtcgcaatggctaacgaatatatttggtacggtatatgaaaaactaaaaccggtactagattggctagaagaaaaatttaaagaaggtgtagaatttctacgtgatggttgggaaatagtaaaatttatatcgacgtgtgcgtgtgaaatagtaggtggtcaaatagtaacgtgtgcgaaagaaataaaagaatcggtacaaacgttttttaaactagtaaataaatttctagcgctatgtgcggattcgataataataggtggtgcgaaactaaaagcgctaaatctaggtgaaacgtttgtgacgcattcgaaaggtttatatcgtaaatgtgtaaaatcgcgtgaagaaacgggtctactaatgccgctaaaagcgccgaaagaaataatatttttagaaggtgaaacgctaccgacggaagtattaacggaagaagtagtattaaaaacgggtgatttacaaccgttagaacaaccgacgtcggaagcggtagaagcgccgttagtaggtacgccggtatgtataaatggtctaatgttactagaaataaaagatacggaaaaatattgtgcgctagcgccgaatatgatggtaacgaataatacgtttacgctaaaaggtggtgcgccgacgaaagtaacgtttggtgatgatacggtaatagaagtacaaggttataaatcggtaaatataacgtttgaactagatgaacgtatagataaagtactaaatgaaaaatgttcggcgtatacggtagaactaggtacggaagtaaatgaatttgcgtgtgtagtagcggatgcggtaataaaaacgttacaaccggtatcggaattactaacgccgctaggtatagatttagatgaatggtcgatggcgacgtattatttatttgatgaatcgggtgaatttaaattagcgtcgcatatgtattgttcgttttatccgccggatgaagatgaagaagaaggtgattgtgaagaagaagaatttgaaccgtcgacgcaatatgaatatggtacggaagatgattatcaaggtaaaccgttagaatttggtgcgacgtcggcggcgctacaaccggaagaagaacaagaagaagattggttggatgatgattcgcaacaaacggtaggtcaacaagatggttcggaagataatcaaacgacgacgatacaaacgatagtagaagtacaaccgcaattagaaatggaactaacgccggtagtacaaacgatagaagtaaattcgttttcgggttatttaaaactaacggataatgtatatataaaaaatgcggatatagtagaagaagcgaaaaaagtaaaaccgacggtagtagtaaatgcggcgaatgtatatctaaaacatggtggtggtgtagcgggtgcgttaaataaagcgacgaataatgcgatgcaagtagaatcggatgattatatagcgacgaatggtccgctaaaagtaggtggttcgtgtgtattatcgggtcataatctagcgaaacattgtctacatgtagtaggtccgaatgtaaataaaggtgaagatatacaactactaaaatcggcgtatgaaaattttaatcaacatgaagtactactagcgccgttattatcggcgggtatatttggtgcggacccgatacattcgttacgtgtgtgtgtagatacggtacgcacgaatgtatatttagcggtatttgataaaaatctatatgataaactagtatcgtcgtttttagaaatgaaatcggaaaaacaagtagaacaaaaaatagcggaaataccgaaagaagaagtaaaaccgtttataacggaatcgaaaccgtcggtagaacaacgtaaacaagatgataaaaaaataaaagcgtgtgtagaagaagtaacgacgacgctagaagaaacgaaatttctaacagaaaatttattactatatatagatataaatggtaatctacatccggattcggcgacgctagtatcggatatagatataacgtttttaaaaaaagatgcgccgtatatagtaggtgatgtagtacaagaaggtgtattaacggcggtagtaataccgacgaaaaaagcgggtggtacgacggaaatgctggcgaaagcgttacgtaaagtaccgacggataattatataacgacgtacccggg

SEQ ID NO: 34 - DNA, 2736 bp, Artificial Sequence
  Codon deoptimized nucleotide sequence of sub-fragment 2B. Based on SARS-CoV-2.
cccgggtcaaggtttaaatggttatacggtagaagaagcgaaaacggtactaaaaaaatgtaaatcggcgttttatatactaccgtcgataatatcgaatgaaaaacaagaaatactaggtacggtatcgtggaatttacgtgaaatgctagcgcatgcggaagaaacacgtaaattaatgccggtatgtgtagaaacgaaagcgatagtatcgacgatacaacgtaaatataaaggtataaaaatacaagaaggtgtagtagattatggtgcgcgtttttatttttatacgtcgaaaacgacggtagcgtcgctaataaatacgctaaatgatctaaatgaaacgctagtaacgatgccgctaggttatgtaacgcatggtttaaatttagaagaagcggcgcgttatatgcgttcgctaaaagtaccggcgacggtatcggtatcgtcgccggatgcggtaacggcgtataatggttatctaacgtcgtcgtcgaaaacgccggaagaacattttatagaaacgatatcgctagcgggttcgtataaagattggtcgtattcgggtcaatcgacgcaactaggtatagaatttctaaaacgtggtgataaatcggtatattatacgtcgaatccgacgacgtttcatctagatggtgaagtaataacgtttgataatctaaaaacgctactatcgttacgtgaagtacgtacgataaaagtatttacgacggtagataatataaatctacatacgcaagtagtagatatgtcgatgacatatggacaacaatttggtccgacgtatttagatggtgcggatgttacgaaaataaaaccgcataattcgcatgaaggtaaaacgttttatgtattaccgaatgatgatacgctacgtgtagaagcgtttgaatattatcatacgactgatccgtcgtttctaggtcgttatatgtcggcgttaaatcatacgaaaaaatggaaatatccgcaagtaaatggtttaacgtcgataaaatgggcggataataattgttatctagcgacggcgttattaacgctacaacaaatagaattaaaatttaatccgccggcgctacaagatgcgtattatcgtgcgcgtgcgggtgaagcggcgaatttttgtgcgctaatattagcgtattgtaataaaacggtaggtgaattaggtgatgtacgtgaaacgatgtcgtatttatttcaacatgcgaatttagattcgtgtaaacgtgtattaaatgtagtatgtaaaacgtgtggtcaacaacaaacgacgctaaaaggtgtagaagcggtaatgtatatgggtacgctatcgtatgaacaatttaaaaaaggtgtacaaataccgtgtacgtgtggtaaacaagcgacgaaatatctagtacaacaagaatcgccgtttgtaatgatgtcggcgccgccggcgcaatatgaactaaaacatggtacgtttacgtgtgcgtcggaatatacgggtaattatcaatgtggtcattataaacatataacgtcgaaagaaacgttatattgtatagatggtgcgttacttacgaaatcgtcggaatataaaggtccgataacggatgtattttataaagaaaattcgtatacgacgacgataaaaccggtaacgtataaattagatggtgtagtatgtacggaaatagatccgaaattagataattattataaaaaagataattcgtattttacggaacaaccgatagatctagtaccgaatcaaccatatccgaatgcgtcgtttgataattttaaatttgtatgtgataatataaaatttgcggatgatttaaatcaattaacgggttataaaaaaccggcgtcgcgtgaactaaaagtaacgttttttccggatttaaatggtgatgtagtagcgatagattataaacattatacgccgtcgtttaaaaaaggtgcgaaattattacataaaccgatagtatggcatgtaaataatgcgacgaataaagcgacgtataaaccgaatacgtggtgtatacggtgtctatggagcacgaaaccggtagaaacgtcgaattcgtttgatgtactaaaatcggaagatgcgcaaggtatggataatctagcgtgtgaagatctaaaaccggtatcggaagaagtagtagaaaatccgacgatacaaaaagatgtactggaatgtaatgtaaaaacgacggaagtagtaggtgatataatactaaaaccggctaataattcgttaaaaataacggaagaagtaggtcatacggatctaatggcggcgtatgtagataattcgtcgctaacgataaaaaaaccgaatgaattatcgcgtgtattaggtttaaaaacgctagcgacgcatggtttagctgctgtaaattcggtaccgtgggatacgatagcgaattatgcgaaaccgtttctaaataaagtagtatcgacgacgacgaatatagtaacgcgatgtttaaatcgtgtatgtacgaattatatgccgtatttttttacgttattactacaattatgtacgtttacgcgatcgacgaattcgcgtataaaagcgtcgatgccgacgacgatagcgaaaaatacggtaaaatcggtaggtaaattttgtctagaagcgtcgtttaattatttaaaatcgccgaatttttctaaactaataaatataataatatggtttttactattatcggtatgcctagg

SEQ ID NO: 35 - DNA, 1608 bp, Artificial Sequence
  Codon deoptimized nucleotide sequence of sub-fragment 2C. Based on SARS-CoV-2.
cctaggttcgttaatatattcgacggcggcgttaggtgtattaatgtcgaatttaggtatgccgtcgtattgtacgggttatcgtgaaggttatttaaattcgacgaatgtaacgatagcgacgtattgtacgggttcgataccgtgttcggtatgtctatcgggtttagattcgttagatacgtatccgtcgttagaaacgatacaaataacgatatcgtcgtttaaatgggatttaacggcgtttggtttagtagcggaatggtttttagcgtatatactatttacgcgatttttttatgtactaggtttagcggcgataatgcaattatttttttcgtattttgcggtacattttatttcgaattcgtggctaatgtggttaataataaatctagtacaaatggcgccgatatcggcgatggtacgtatgtatatattttttgcgtcgttttattatgtatggaaatcgtatgtacatgtagtagatggttgtaattcgtcgacgtgtatgatgtgttataaacgtaatcgtgcgacgcgagtagaatgtacgacgatagtaaatggtgtacgtcgttcgttttatgtatatgcgaatggtggtaaaggtttttgtaaactacataattggaattgtgtaaattgtgatacgttttgtgcgggttcgacgtttatatcggatgaagtagcgcgtgatttatcgctacaatttaaacgtccgataaatccgacggatcaatcgtcgtatatagtagattcggtaacggtaaaaaatggttcgatacatctatattttgataaagcgggtcaaaaaacgtatgaacgtcattcgctatcgcattttgtaaatttagataatctacgtgcgaataatacgaaaggttcgttaccgataaatgtaatagtatttgatggtaaatcgaaatgtgaagaatcgtcggcgaaatcggcgtcggtatattattcgcaactaatgtgtcaaccgatactattactagatcaagcgttagtatcggatgtaggtgattcggcggaagtagcggtaaaaatgtttgatgcgtatgtaaatacgttttcgtcgacgtttaatgtaccgatggaaaaactaaaaacgctagtagcgacggcggaagcggaactagcgaaaaatgtatctttagataatgtattatcgacgtttatatcggcggcgcgtcaaggttttgtagattcggatgtagaaacgaaagatgtagtagaatgtctaaaattatcgcatcaatcggatatagaagtaacgggtgattcgtgtaataattatatgctaacgtataataaagtagaaaatatgacgccgcgtgatctaggtgcgtgtatagattgttcggcgcgtcatataaatgcgcaagtagcgaaatcgcataatatagcgttaatatggaatgtaaaagattttatgtcgttatcggaacaactacgtaaacaaatacgttcggcggcgaaaaaaaataatttaccgtttaaattaacgtgtgcgacgacgcgacaagtagtaaatgtagtaacgacgaaaatagcgctaaaaggtggtaaaatagtaaataattggttaaaacaattaattaa

SEQ ID NO: 36 - DNA, 2585 bp, Artificial Sequence
  Codon deoptimized nucleotide sequence of sub-fragment 3A. Based on SARS-CoV-2.
ttaattaaagtaacgctagtatttctatttgtagcggcgatattttatttaataacgccggtacatgtaatgtcgaaacatacggatttttcgtcggaaataataggttataaagcgatagatggtggtgtaactcgtgatatagcgtcgacggatacgtgttttgcgaataaacatgcggattttgatacgtggttttcgcaacgtggtggttcgtatacgaatgataaagcgtgtccgttaatagcggcggtaataacacgtgaagtaggttttgtagtaccgggtttaccgggtacgatattacgtacgacgaatggtgattttttacattttttaccgcgtgtattttcggcggtaggtaatatatgttatacgccgtcgaaactaatagaatatacggattttgcgacgtcggcgtgtgtattagcggcggaatgtacgatatttaaagatgcgtcgggtaaaccggtaccgtattgttatgatacgaatgtactagaaggttcggtagcgtatgaatcgttacgcccggatacacgttatgtactaatggatggttcgataatacaatttccgaatacgtatctagaaggttcggtacgtgtagtaacgacgtttgattcggaatattgtcgtcatggtacgtgtgaacgttcggaagcgggtgtatgtgtatcgacgtcggggcgttgggtactaaataatgattattatcgttcgttaccgggtgtattctgtggtgtagatgcggtaaatttactaacgaatatgtttacgccgctgatacaaccgataggtgcgttagatatatcggcgtcgatagtagcgggtggtatagtagcgatagtagtaacgtgtctagcgtattattttatgcgttttcgtcgtgcgtttggtgaatattcgcatgtagtagcgtttaatacgttactatttctaatgtcttttacagtactatgtttaacgccggtatattcttttttaccgggtgtatattcggtaatatatttatatttaacgttttatctaacgaatgatgtatcgtttttagcgcatatacaatggatggtaatgtttacgccgttagtaccgttttggataacaatagcgtatataatatgtatatcgacgaaacatttttattggtttttttcgaattatctgaaacgtcgtgtagtatttaatggtgtatctttttcgacgtttgaagaagcggcgctatgtacatttttattaaataaagaaatgtatctaaaattacgttcggatgtactattaccgctaacgcaatataatcgttatttagcgctatataataaatataaatatttttcgggtgcgatggatacgacgtcgtatcgtgaagcggcgtgttgtcatctagcgaaagcgctaaatgatttttcgaattcgggttcggatgtactatatcaaccgccgcaaacgtcgataacgtcggcggtattacaatcgggttttcgtaaaatggcgtttccgtcgggtaaagtagaaggttgtatggtacaagtaacgtgtggtacgacgacgctaaatggtctatggctagatgatgtagtatattgtccgcgtcatgtaatatgtacgtcggaagatatgctaaatccgaattatgaagatttactaatacgtaaatcgaatcataattttttagtacaagcgggtaatgtacaactacgtgtaataggtcattcgatgcaaaattgtgtactaaaactaaaagtagatacggcgaatccgaaaacaccgaaatataaatttgtacgtatacaaccgggtcaaacgttttcggtattagcgtgttataatggttctccgtcgggtgtatatcaatgtgcgatgcgtccgaattttacgattaaaggttcgtttctaaatggttcgtgtggttcggtaggttttaatatagattatgattgtgtatcgttttgttatatgcatcatatggaattaccgacgggtgtacatgcgggtacggatttagaaggtaatttttatggtccgtttgtagatcgtcaaacagcgcaagcggcgggtacggatacgacgattacggtaaatgtattagcgtggttatatgcggcggtaataaatggtgatcgttggtttctaaatcgttttacgacgacgctaaatgattttaatctagtagcgatgaaatataattatgaaccgctgacacaagatcatgtagatatactaggtccgctatcggcgcaaacgggtatagcggtattagatatgtgtgcgtcgttaaaagaattactacaaaatggtatgaatggtcgtacgatattaggttcggcgttattagaagatgaatttacgccgtttgatgtagtacgtcaatgttcgggtgtaacgtttcaatcggcggtaaaacgtacgataaaaggtacgcatcattggttattactaacgatattaacgtcgctattagtattagtacaatcgacgcaatggtcgttatttttttttttatatgaaaatgcgtttttaccgtttgcgatgggtataatagcgatgtcggcgtttgcgatgatgtttgtaaaacataagcatgc

SEQ ID NO: 37 - DNA, 1563 bp, Artificial Sequence
  Codon deoptimized nucleotide sequence of sub-fragment 3B. Based on SARS-CoV-2.
gcatgcgtttctatgtttatttttattaccgtcgctagcgacggtagcgtattttaatatggtatatatgccggcgtcgtgggtaatgcgtataatgacgtggttagatatggtagatacgtcgttatcgggttttaaactaaaagattgtgtaatgtatgcgtcggcggtagtattactaatactaatgacggcgcgtacggtatatgatgatggtgcgcgtcgtgtatggacgctaatgaatgtattaacgctagtatataaagtatattatgggaatgcgttagatcaagcgatatcgatgtgggcgctaataatatcggtaacgtcgaattattcgggtgtagtaacgacggtaatgtttttagcgcgtggtatagtatttatgtgtgtagaatattgtccgatattttttataacgggtaatacactacaatgtataatgctagtatattgttttttaggttatttttgtacgtgttattttggtctattttgtttactaaatcgttattttcgtctaacactaggtgtatatgattatttagtatcgacgcaagaatttcgttatatgaattcgcaaggtctactaccgccgaaaaattcgatagatgcgtttaaactaaatataaaattattaggtgtaggtggtaaaccgtgtataaaagtagcgacggtacaatcgaaaatgtcggatgtaaaatgtacatcggtagtattactatcggtattacaacaactacgtgtagaatcgtcgtcgaaattatgggcgcaatgtgtacaattacataatgatatactattagcgaaagatacgacggaagcgtttgaaaaaatggtatcgctactatcggtattactatcgatgcaaggtgcggtagatataaataaactatgtgaagaaatgctagataatcgtgcgacgttacaagcgatagcgtcggaattttcgtcgctaccgtcgtatgcggcgtttgcgacggcgcaagaagcgtatgaacaagcggtagcgaatggtgattcggaagtagtactaaaaaaattaaaaaaatcgttaaatgtagcgaaatcggaatttgatcgtgatgcggcgatgcaacgtaaattagaaaaaatggcggatcaagcgatgacgcaaatgtataaacaagcgcgttcggaagataaacgtgcgaaagtaacgtcggcgatgcaaacgatgctatttacgatgctacgtaaattagataatgatgcgctaaataatataataaataatgcgcgtgatggttgtgtaccgttaaatataataccgctaacgacggcggcgaaactaatggtagtaataccggattataatacatataaaaatacgtgtgatggtacgacgtttacgtatgcgtcggcgttatgggaaatacaacaagtagtagatgcggattcgaaaatagtacaactatcggaaatatcgatggataattcgccgaatttagcgtggccgctaatagtaacggcgttacgtgcgaattcggcggtaaaattacaaaataatgaactatcgccggtagcgctacgacagatgtc

SEQ ID NO: 38 - DNA, 225 bp, Artificial Sequence
  Severe acute respiratory syndrome coronavirus 2 isolate Wuhan-Hu-1, partial genome, Envelope protein
atgtactcattcgtttcggaagagacaggtacgttaatagttaatagcgtacttctttttcttgctttcgtggtattcttgctagttacactagccatccttactgcgcttcgattgtgtgcgtactgctgcaatattgttaacgtgagtcttgtaaaaccttctttttacgtttactctcgtgttaaaaatctgaattcttctagagttcctgatcttctggtc

SEQ ID NO: 39 - DNA, 7059 bp, Artificial Sequence
  Clone pCC1-4K-SARS-CoV-2-77-1. Based on SARS-CoV-2.
cgggtcccacgtgctagcgctaacataggttgtaaccatacaggtgttgttggagaaggttccgaaggtcttaatgacaaccttcttgaaatactccaaaaagagaaagtcaacatcaatattgttggtgactttaaacttaatgaagagatcgccattattttggcatctttttctgcttccacaagtgcttttgtggaaactgtgaaaggtttggattataaagcattcaaacaaattgttgaatcctgtggtaattttaaagttacaaaaggaaaagctaaaaaaggtgcctggaatattggtgaacagaaatcaatactgagtcctctttatgcatttgcatcagaggctgctcgtgttgtacgatcaattttctcccgcactcttgaaactgctcaaaattctgtgcgtgttttacagaaggccgctataacaatactagatggaatttcacagtattcactgagactcattgatgctatgatgttcacatctgatttggctactaacaatctagttgtaatggcctacattacaggtggtgttgttcagttgacttcgcagtggctaactaacatctttggcactgtttatgaaaaactcaaacccgtccttgattggcttgaagagaagtttaaggaaggtgtagagtttcttagagacggttgggaaattgttaaatttatctcaacctgtgcttgtgaaattgtcggtggacaaattgtcacctgtgcaaaggaaattaaggagagtgttcagacattctttaagcttgtaaataaatttttggctttgtgtgctgactctatcattattggtggagctaaacttaaagccttgaatttaggtgaaacatttgtcacgcactcaaagggattgtacagaaagtgtgttaaatccagagaagaaactggcctactcatgcctctaaaagccccaaaagaaattatcttcttagagggagaaacacttcccacagaagtgttaacagaggaagttgtcttgaaaactggtgatttacaaccattagaacaacctactagtgaagctgttgaagctccattggttggtacaccagtttgtattaacgggcttatgttgctcgaaatcaaagacacagaaaagtactgtgcccttgcacctaatatgatggtaacaaacaataccttcacactcaaaggcggtgcaccaacaaaggttacttttggtgatgacactgtgatagaagtgcaaggttacaagagtgtgaatatcacttttgaacttgatgaaaggattgataaagtacttaatgagaagtgctctgcctatacagttgaactcggtacagaagtaaatgagttcgcctgtgttgtggcagatgctgtcataaaaactttgcaaccagtatctgaattacttacaccactgggcattgatttagatgagtggagtatggctacatactacttatttgatgagtctggtgagtttaaattggcttcacatatgtattgttctttctaccctccagatgaggatgaagaagaaggtgattgtgaagaagaagagtttgagccatcaactcaatatgagtatggtactgaagatgattaccaaggtaaacctttggaatttggtgccacttctgctgctcttcaacctgaagaagagcaagaagaagattggttagatgatgatagtcaacaaactgttggtcaacaagacggcagtgaggacaatcagacaactactattcaaacaattgttgaggttcaacctcaattagagatggaacttacaccagttgttcagactattgaagtgaatagttttagtggttatttaaaacttactgacaatgtatacattaaaaatgcagacattgtggaagaagctaaaaaggtaaaaccaacagtggttgttaatgcagccaatgtttaccttaaacatggaggaggtgttgcaggagccttaaataaggctactaacaatgccatgcaagttgaatctgatgattacatagctactaatggaccacttaaagtgggtggtagttgtgttttaagcggacacaatcttgctaaacactgtcttcatgttgtcggcccaaatgttaacaaaggtgaagacattcaacttcttaagagtgcttatgaaaattttaatcagcacgaagttctacttgcaccattattatcagctggtatttttggtgctgaccctatacattctttaagagtttgtgtagatactgttcgcacaaatgtctacttagctgtctttgataaaaatctctatgacaaacttgtttcaagctttttggaaatgaagagtgaaaagcaagttgaacaaaagatcgctgagattcctaaagaggaagttaagccatttataactgaaagtaaaccttcagttgaacagagaaaacaagatgataagaaaatcaaagcttgtgttgaagaagttacaacaactctggaagaaactaagttcctcacagaaaacttgttactttatattgacattaatggcaatcttcatccagattctgccactcttgttagtgacattgacatcactttcttaaagaaagatgctccatatatagtgggtgatgttgttcaagagggtgttttaactgctgtggttatacctactaaaaaggctggtggcactactgaaatgctagcgaaagctttgagaaaagtgccaacagacaattatataaccacttacccgggtcagggtttaaatggttacactgtagaggaggcaaagacagtgcttaaaaagtgtaaaagtgccttttacattctaccatctattatctctaatgagaagcaagaaattcttggaactgtttcttggaatttgcgagaaatgcttgcacatgcagaagaaacacgcaaattaatgcctgtctgtgtggaaactaaagccatagtttcaactatacagcgtaaatataagggtattaaaatacaagagggtgtggttgattatggtgctagattttacttttacaccagtaaaacaactgtagcgtcacttatcaacacacttaacgatctaaatgaaactcttgttacaatgccacttggctatgtaacacatggcttaaatttggaagaagctgctcggtatatgagatctctcaaagtgccagctacagtttctgtttcttcacctgatgctgttacagcgtataatggttatcttacttcttcttctaaaacacctgaagaacattttattgaaaccatctcacttgctggttcctataaagattggtcctattctggacaatctacacaactaggtatagaatttcttaagagaggtgataaaagtgtatattacactagtaatcctaccacattccacctagatggtgaagttatcacctttgacaatcttaagacacttctttctttgagagaagtgaggactattaaggtgtttacaacagtagacaacattaacctccacacgcaagttgtggacatgtcaatgacatatggacaacagtttggtccaacttatttggatggagctgatgttactaaaataaaacctcataattcacatgaaggtaaaacattttatgttttacctaatgatgacactctacgtgttgaggcttttgagtactaccacacaactgatcctagttttctgggtaggtacatgtcagcattaaatcacactaaaaagtggaaatacccacaagttaatggtttaacttctattaaatgggcagataacaactgttatcttgccactgcattgttaacactccaacaaatagagttgaagtttaatccacctgctctacaagatgcttattacagagcaagggctggtgaagctgctaacttttgtgcacttatcttagcctactgtaataagacagtaggtgagttaggtgatgttagagaaacaatgagttacttgtttcaacatgccaatttagattcttgcaaaagagtcttgaacgtggtgtgtaaaacttgtggacaacagcagacaacccttaagggtgtagaagctgttatgtacatgggcacactttcttatgaacaatttaagaaaggtgttcagataccttgtacgtgtggtaaacaagctacaaaatatctagtacaacaggagtcaccttttgttatgatgtcagcaccacctgctcagtatgaacttaagcatggtacatttacttgtgctagtgagtacactggtaattaccagtgtggtcactataaacatataacttctaaagaaactttgtattgcatagacggtgctttacttacaaagtcctcagaatacaaaggtcctattacggatgttttctacaaagaaaacagttacacaacaaccataaaaccagttacttataaattggatggtgttgtttgtacagaaattgaccctaagttggacaattattataagaaagacaattcttatttcacagagcaaccaattgatcttgtaccaaaccaaccatatccaaacgcaagcttcgataattttaagtttgtatgtgataatatcaaatttgctgatgatttaaaccagttaactggttataagaaacctgcttcaagagagcttaaagttacatttttccctgacttaaatggtgatgtggtggctattgattataaacactacacaccctcttttaagaaaggagctaaattgttacataaacctattgtttggcatgttaacaatgcaactaataaagccacgtataaaccaaatacctggtgtatacgttgtctttggagcacaaaaccagttgaaacatcaaattcgtttgatgtactgaagtcagaggacgcgcagggaatggataatcttgcctgcgaagatctaaaaccagtctctgaagaagtagtggaaaatcctaccatacagaaagacgttcttgagtgtaatgtgaaaactaccgaagttgtaggagacattatacttaaaccagcaaataatagtttaaaaattacagaagaggttggccacacagatctaatggctgcttatgtagacaattctagtcttactattaagaaacctaatgaattatctagagtattaggtttgaaaacccttgctactcatggtttagctgctgttaatagtgtcccttgggatactatagctaattatgctaagccttttcttaacaaagttgttagtacaactactaacatagttacacggtgtttaaaccgtgtttgtactaattatatgccttatttctttactttattgctacaattgtgtacttttactagaagtacaaattctagaattaaagcatctatgccgactactatagcaaagaatactgttaagagtgtcggtaaattttgtctagaggcttcatttaattatttgaagtcacctaatttttctaaactgataaatattataatttggtttttactattaagtgtttgcctaggttcgttaatctactcaaccgctgctttaggtgttttaatgtcgaatttaggcatgccttcttactgtactggttacagagaaggctatttgaactcgactaatgtcactattgcaacctactgtactggttctataccttgttcggtttgtcttagtggtttagattctttagacacctatccttcgttagaaactatacaaattaccatttcatcttttaaatgggatttaactgcttttggcttagttgcagagtggtttttggcatatattcttttcactaggtttttctatgtacttggattggctgcaatcatgcaattgtttttctcgtattttgcagtacattttattagtaattcgtggcttatgtggttaataattaatcttgtacaaatggccccgatttcagctatggttagaatgtacatcttctttgcatcgttttattatgtatggaaaagttatgtgcatgttgtagacggttgtaattcgtcaacttgtatgatgtgttacaaacgtaatagagcaacaagagtcgaatgtacaactattgttaatggtgttagaaggtcgttttatgtctatgctaatggaggtaaaggcttttgcaaactacacaattggaattgtgttaattgtgatacattctgtgctggtagtacatttatttcggatgaagttgcgagagacttgtcactacagtttaaaagaccaataaatcctactgaccagtcgtcttacatcgttgatagtgttacagtgaagaatggttcgatccatctttactttgataaagctggtcaaaagacttatgaaagacattctctctcgcattttgttaacttagacaacctgagagctaataacactaaaggttcattgcctattaatgttatagtttttgatggtaaatcgaaatgtgaagaatcatcggcaaaatcagcgtcggtttactacagtcagcttatgtgtcaacctatactgttactagatcaggcattagtgtcggatgttggtgatagtgcggaagttgcagttaaaatgtttgatgcttacgttaatacgttttcgtcaacttttaacgtaccaatggaaaaactcaaaacactagttgcaactgcagaagctgaacttgcaaagaatgtgtccttagacaatgtcttatcgacttttatttcagcagctcggcaagggtttgttgattcggatgtagaaactaaagatgttgttgaatgtcttaaattgtcacatcaatcggacatagaagttactggcgatagttgtaataactatatgctcacctataacaaagttgaaaacatgacaccccgtgaccttggtgcttgtattgactgttcggcgcgtcatattaatgcgcaggtagcaaaaagtcacaacattgctttgatatggaacgttaaagatttcatgtcgttgtctgaacaactacgaaaacaaatacgttcggctgctaaaaagaataacttaccttttaagttgacatgtgcaactactagacaagttgttaatgttgtaacaacaaagatagcacttaagggtggtaaaattgttaataattggttgaagcagttaattaaa

SEQ ID NO: 40 - DNA, 7059 bp, Artificial Sequence
  Clone pCC1-4K-SARS-CoV-2-77-2. Based on SARS-CoV-2.
cgggtcccacgtgctagcgctaacataggttgtaaccatacaggtgttgttggagaaggttccgaaggtcttaatgacaaccttcttgaaatactccaaaaagagaaagtcaacatcaatattgttggtgactttaaacttaatgaagagatcgccattattttggcatctttttctgcttccacaagtgcttttgtggaaactgtgaaaggtttggattataaagcattcaaacaaattgttgaatcctgtggtaattttaaagttacaaaaggaaaagctaaaaaaggtgcctggaatattggtgaacagaaatcaatactgagtcctctttatgcatttgcatcagaggctgctcgtgttgtacgatcaattttctcccgcactcttgaaactgctcaaaattctgtgcgtgttttacagaaggccgctataacaatactagatggaatttcacagtattcactgagactcattgatgctatgatgttcacatctgatttggctactaacaatctagttgtaatggcctacattacaggtggtgttgttcagttgacttcgcagtggctaactaacatctttggcactgtttatgaaaaactcaaacccgtccttgattggcttgaagagaagtttaaggaaggtgtagagtttcttagagacggttgggaaattgttaaatttatctcaacctgtgcttgtgaaattgtcggtggacaaattgtcacctgtgcaaaggaaattaaggagagtgttcagacattctttaagcttgtaaataaatttttggctttgtgtgctgactctatcattattggtggagctaaacttaaagccttgaatttaggtgaaacatttgtcacgcactcaaagggattgtacagaaagtgtgttaaatccagagaagaaactggcctactcatgcctctaaaagccccaaaagaaattatcttcttagagggagaaacacttcccacagaagtgttaacagaggaagttgtcttgaaaactggtgatttacaaccattagaacaacctactagtgaagctgttgaagctccattggttggtacaccagtttgtattaacgggcttatgttgctcgaaatcaaagacacagaaaagtactgtgcccttgcacctaatatgatggtaacaaacaataccttcacactcaaaggcggtgcaccaacaaaggttacttttggtgatgacactgtgatagaagtgcaaggttacaagagtgtgaatatcacttttgaacttgatgaaaggattgataaagtacttaatgagaagtgctctgcctatacagttgaactcggtacagaagtaaatgagttcgcctgtgttgtggcagatgctgtcataaaaactttgcaaccagtatctgaattacttacaccactgggcattgatttagatgagtggagtatggctacatactacttatttgatgagtctggtgagtttaaattggcttcacatatgtattgttctttctaccctccagatgaggatgaagaagaaggtgattgtgaagaagaagagtttgagccatcaactcaatatgagtatggtactgaagatgattaccaaggtaaacctttggaatttggtgccacttctgctgctcttcaacctgaagaagagcaagaagaagattggttagatgatgatagtcaacaaactgttggtcaacaagacggcagtgaggacaatcagacaactactattcaaacaattgttgaggttcaacctcaattagagatggaacttacaccagttgttcagactattgaagtgaatagttttagtggttatttaaaacttactgacaatgtatacattaaaaatgcagacattgtggaagaagctaaaaaggtaaaaccaacagtggttgttaatgcagccaatgtttaccttaaacatggaggaggtgttgcaggagccttaaataaggctactaacaatgccatgcaagttgaatctgatgattacatagctactaatggaccacttaaagtgggtggtagttgtgttttaagcggacacaatcttgctaaacactgtcttcatgttgtcggcccaaatgttaacaaaggtgaagacattcaacttcttaagagtgcttatgaaaattttaatcagcacgaagttctacttgcaccattattatcagctggtatttttggtgctgaccctatacattctttaagagtttgtgtagatactgttcgcacaaatgtctacttagctgtctttgataaaaatctctatgacaaacttgtttcaagctttttggaaatgaagagtgaaaagcaagttgaacaaaagatcgctgagattcctaaagaggaagttaagccatttataactgaaagtaaaccttcagttgaacagagaaaacaagatgataagaaaatcaaagcttgtgttgaagaagttacaacaactctggaagaaactaagttcctcacagaaaacttgttactttatattgacattaatggcaatcttcatccagattctgccactcttgttagtgacattgacatcactttcttaaagaaagatgctccatatatagtgggtgatgttgttcaagagggtgttttaactgctgtggttatacctactaaaaaggctggtggcactactgaaatgctagcgaaagctttgagaaaagtgccaacagacaattatataaccacttacccgggtcagggtttaaatggttacactgtagaggaggcaaagacagtgcttaaaaagtgtaaatcggccttttacattctaccatctattatctcgaatgagaagcaagaaattcttggaactgtttcttggaatttgcgagaaatgcttgcacatgcagaagaaacacgcaaattaatgcctgtctgtgtggaaactaaagccatagtttcgactatacagcgtaaatataagggtattaaaatacaagagggtgtggttgattatggtgctagattttacttttacaccagtaaaacaactgtagcgtcgcttatcaacacacttaacgatctaaatgaaactcttgttacaatgccacttggctatgtaacacatggcttaaatttggaagaagctgctcggtatatgagatctctcaaagtgccagctacagtttcggtttcttcgcctgatgctgttacagcgtataatggttatcttacttcttcgtctaaaacacctgaagaacattttattgaaaccatctcacttgctggttcgtataaagattggtcctattcgggacaatctacacaactaggtatagaatttcttaagagaggtgataaatcggtatattacactagtaatcctaccacattccacctagatggtgaagttatcacctttgacaatcttaagacacttctttcgttgagagaagtgaggactattaaggtgtttacaacagtagacaacattaacctccacacgcaagttgtggacatgtcaatgacatatggacaacagtttggtccaacttatttggatggagctgatgttactaaaataaaacctcataattcgcatgaaggtaaaacattttatgttttacctaatgatgacactctacgtgttgaggcttttgagtactaccacacaactgatcctagttttctgggtaggtacatgtcggcattaaatcacactaaaaagtggaaatacccacaagttaatggtttaacttctattaaatgggcagataacaactgttatcttgccactgcattgttaacactccaacaaatagagttgaagtttaatccacctgctctacaagatgcttattacagagcaagggctggtgaagctgctaacttttgtgcacttatcttagcctactgtaataagacagtaggtgagttaggtgatgttagagaaacaatgtcgtacttgtttcaacatgccaatttagattcttgcaaaagagtcttgaacgtggtgtgtaaaacttgtggacaacagcagacaacccttaagggtgtagaagctgttatgtacatgggcacactttcgtatgaacaatttaagaaaggtgttcagataccttgtacgtgtggtaaacaagctacaaaatatctagtacaacaggagtcaccttttgttatgatgtcggcaccacctgctcagtatgaacttaagcatggtacatttacttgtgctagtgagtacactggtaattaccagtgtggtcactataaacatataacttcgaaagaaactttgtattgcatagacggtgctttacttacaaagtcctcggaatacaaaggtcctattacggatgttttctacaaagaaaacagttacacaacaaccataaaaccagttacttataaattggatggtgttgtttgtacagaaattgaccctaagttggacaattattataagaaagacaattcgtatttcacagagcaaccaattgatcttgtaccaaaccaaccatatccaaacgcaagcttcgataattttaagtttgtatgtgataatatcaaatttgctgatgatttaaaccagttaactggttataagaaacctgcttcgagagagcttaaagttacatttttccctgacttaaatggtgatgtggtggctattgattataaacactacacaccctcttttaagaaaggagctaaattgttacataaacctattgtttggcatgttaacaatgcaactaataaagccacgtataaaccaaatacctggtgtatacgttgtctttggtcgacaaaaccagttgaaacatcaaattcgtttgatgtactgaagtcagaggacgcgcagggaatggataatcttgcctgcgaagatctaaaaccagtctcggaagaagtagtggaaaatcctaccatacagaaagacgttcttgagtgtaatgtgaaaactaccgaagttgtaggagacattatacttaaaccagcaaataatagtttaaaaattacagaagaggttggccacacagatctaatggctgcttatgtagacaattcgagtcttactattaagaaacctaatgaattatctagagtattaggtttgaaaacccttgctactcatggtttagctgctgttaattcggtcccttgggatactatagctaattatgctaagccttttcttaacaaagttgttagtacaactactaacatagttacacggtgtttaaaccgtgtttgtactaattatatgccttatttctttactttattgctacaattgtgtacttttactagatcgacaaattctagaattaaagcatcgatgccgactactatagcaaagaatactgttaagagtgtcggtaaattttgtctagaggcttcgtttaattatttgaagtcacctaatttttcgaaactgataaatattataatttggtttttactattaagtgtttgcctaggttctttaatctactcaaccgctgctttaggtgttttaatgtctaatttaggcatgccttcttactgtactggttacagagaaggctatttgaactctactaatgtcactattgcaacctactgtactggttctataccttgtagtgtttgtcttagtggtttagattctttagacacctatccttctttagaaactatacaaattaccatttcatcttttaaatgggatttaactgcttttggcttagttgcagagtggtttttggcatatattcttttcactaggtttttctatgtacttggattggctgcaatcatgcaattgtttttcagctattttgcagtacattttattagtaattcttggcttatgtggttaataattaatcttgtacaaatggccccgatttcagctatggttagaatgtacatcttctttgcatcattttattatgtatggaaaagttatgtgcatgttgtagacggttgtaattcatcaacttgtatgatgtgttacaaacgtaatagagcaacaagagtcgaatgtacaactattgttaatggtgttagaaggtccttttatgtctatgctaatggaggtaaaggcttttgcaaactacacaattggaattgtgttaattgtgatacattctgtgctggtagtacatttattagtgatgaagttgcgagagacttgtcactacagtttaaaagaccaataaatcctactgaccagtcttcttacatcgttgatagtgttacagtgaagaatggttccatccatctttactttgataaagctggtcaaaagacttatgaaagacattctctctctcattttgttaacttagacaacctgagagctaataacactaaaggttcattgcctattaatgttatagtttttgatggtaaatcaaaatgtgaagaatcatctgcaaaatcagcgtctgtttactacagtcagcttatgtgtcaacctatactgttactagatcaggcattagtgtctgatgttggtgatagtgcggaagttgcagttaaaatgtttgatgcttacgttaatacgttttcatcaacttttaacgtaccaatggaaaaactcaaaacactagttgcaactgcagaagctgaacttgcaaagaatgtgtccttagacaatgtcttatctacttttatttcagcagctcggcaagggtttgttgattcagatgtagaaactaaagatgttgttgaatgtcttaaattgtcacatcaatctgacatagaagttactggcgatagttgtaataactatatgctcacctataacaaagttgaaaacatgacaccccgtgaccttggtgcttgtattgactgtagtgcgcgtcatattaatgcgcaggtagcaaaaagtcacaacattgctttgatatggaacgttaaagatttcatgtcattgtctgaacaactacgaaaacaaatacgtagtgctgctaaaaagaataacttaccttttaagttgacatgtgcaactactagacaagttgttaatgttgtaacaacaaagatagcacttaagggtggtaaaattgttaataattggttgaagcagttaattaaa

SEQ ID NO: 41 - DNA, 7059 bp, Artificial Sequence
  Clone pCC1-4K-SARS-CoV-2-77-3. Based on SARS-CoV-2.
cgggtcccacgtgctagcgctaacataggttgtaaccatacaggtgttgttggagaaggttcggaaggtcttaatgacaaccttcttgaaatactccaaaaagagaaagtcaacatcaatattgttggtgactttaaacttaatgaagagatcgccattattttggcatctttttcggcttccacatcggcttttgtggaaactgtgaaaggtttggattataaagcattcaaacaaattgttgaatcctgtggtaattttaaagttacaaaaggaaaagctaaaaaaggtgcctggaatattggtgaacagaaatcgatactgagtcctctttatgcatttgcatcggaggctgctcgtgttgtacgatcaattttctcgcgcactcttgaaactgctcaaaattctgtgcgtgttttacagaaggccgctataacaatactagatggaatttcgcagtattcactgagactcattgatgctatgatgttcacatcggatttggctactaacaatctagttgtaatggcctacattacaggtggtgttgttcagttgacttcgcagtggctaactaacatctttggcactgtttatgaaaaactcaaacccgtccttgattggcttgaagagaagtttaaggaaggtgtagagtttcttagagacggttgggaaattgttaaatttatctcaacctgtgcttgtgaaattgtcggtggacaaattgtcacctgtgcaaaggaaattaaggagtcggttcagacattctttaagcttgtaaataaatttttggctttgtgtgctgactctatcattattggtggagctaaacttaaagccttgaatttaggtgaaacatttgtcacgcactcgaagggattgtacagaaagtgtgttaaatccagagaagaaactggcctactcatgcctctaaaagccccaaaagaaattatcttcttagagggagaaacacttcccacagaagtgttaacagaggaagttgtcttgaaaactggtgatttacaaccattagaacaacctacttcggaagctgttgaagctccattggttggtacaccagtttgtattaacgggcttatgttgctcgaaatcaaagacacagaaaagtactgtgcccttgcacctaatatgatggtaacaaacaataccttcacactcaaaggcggtgcaccaacaaaggttacttttggtgatgacactgtgatagaagtgcaaggttacaagagtgtgaatatcacttttgaacttgatgaaaggattgataaagtacttaatgagaagtgctcggcctatacagttgaactcggtacagaagtaaatgagttcgcctgtgttgtggcagatgctgtcataaaaactttgcaaccagtatctgaattacttacaccactgggcattgatttagatgagtggtcgatggctacatactacttatttgatgagtctggtgagtttaaattggcttcgcatatgtattgttctttctaccctccagatgaggatgaagaagaaggtgattgtgaagaagaagagtttgagccatcgactcaatatgagtatggtactgaagatgattaccaaggtaaacctttggaatttggtgccacttctgctgctcttcaacctgaagaagagcaagaagaagattggttagatgatgattcgcaacaaactgttggtcaacaagacggcagtgaggacaatcagacaactactattcaaacaattgttgaggttcaacctcaattagagatggaacttacaccagttgttcagactattgaagtgaattcgtttagtggttatttaaaacttactgacaatgtatacattaaaaatgcagacattgtggaagaagctaaaaaggtaaaaccaacagtggttgttaatgcagccaatgtttaccttaaacatggaggaggtgttgcaggagccttaaataaggctactaacaatgccatgcaagttgaatcggatgattacatagctactaatggaccacttaaagtgggtggttcgtgtgttttaagcggacacaatcttgctaaacactgtcttcatgttgtcggcccaaatgttaacaaaggtgaagacattcaacttcttaagtcggcttatgaaaattttaatcagcacgaagttctacttgcaccattattatcagctggtatttttggtgctgaccctatacattcgttaagagtttgtgtagatactgttcgcacaaatgtctacttagctgtctttgataaaaatctctatgacaaacttgtttcatcgtttttggaaatgaagagtgaaaagcaagttgaacaaaagatcgctgagattcctaaagaggaagttaagccatttataactgaatcgaaaccttcagttgaacagagaaaacaagatgataagaaaatcaaagcttgtgttgaagaagttacaacaactctggaagaaactaagttcctcacagaaaacttgttactttatattgacattaatggcaatcttcatccagattcggccactcttgttagtgacattgacatcactttcttaaagaaagatgctccatatatagtgggtgatgttgttcaagagggtgttttaactgctgtggttatacctactaaaaaggctggtggcactactgaaatgctagcgaaagctttgagaaaagtgccaacagacaattatataaccacttacccgggtcagggtttaaatggttacactgtagaggaggcaaagacagtgcttaaaaagtgtaaaagtgccttttacattctaccatctattatctctaatgagaagcaagaaattcttggaactgtttcttggaatttgcgagaaatgcttgcacatgcagaagaaacacgcaaattaatgcctgtctgtgtggaaactaaagccatagtttcaactatacagcgtaaatataagggtattaaaatacaagagggtgtggttgattatggtgctagattttacttttacaccagtaaaacaactgtagcgtcacttatcaacacacttaacgatctaaatgaaactcttgttacaatgccacttggctatgtaacacatggcttaaatttggaagaagctgctcggtatatgagatctctcaaagtgccagctacagtttctgtttcttcacctgatgctgttacagcgtataatggttatcttacttcttcttctaaaacacctgaagaacattttattgaaaccatctcacttgctggttcctataaagattggtcctattctggacaatctacacaactaggtatagaatttcttaagagaggtgataaaagtgtatattacactagtaatcctaccacattccacctagatggtgaagttatcacctttgacaatcttaagacacttctttctttgagagaagtgaggactattaaggtgtttacaacagtagacaacattaacctccacacgcaagttgtggacatgtcaatgacatatggacaacagtttggtccaacttatttggatggagctgatgttactaaaataaaacctcataattcacatgaaggtaaaacattttatgttttacctaatgatgacactctacgtgttgaggcttttgagtactaccacacaactgatcctagttttctgggtaggtacatgtcagcattaaatcacactaaaaagtggaaatacccacaagttaatggtttaacttctattaaatgggcagataacaactgttatcttgccactgcattgttaacactccaacaaatagagttgaagtttaatccacctgctctacaagatgcttattacagagcaagggctggtgaagctgctaacttttgtgcacttatcttagcctactgtaataagacagtaggtgagttaggtgatgttagagaaacaatgagttacttgtttcaacatgccaatttagattcttgcaaaagagtcttgaacgtggtgtgtaaaacttgtggacaacagcagacaacccttaagggtgtagaagctgttatgtacatgggcacactttcttatgaacaatttaagaaaggtgttcagataccttgtacgtgtggtaaacaagctacaaaatatctagtacaacaggagtcaccttttgttatgatgtcagcaccacctgctcagtatgaacttaagcatggtacatttacttgtgctagtgagtacactggtaattaccagtgtggtcactataaacatataacttctaaagaaactttgtattgcatagacggtgctttacttacaaagtcctcagaatacaaaggtcctattacggatgttttctacaaagaaaacagttacacaacaaccataaaaccagttacttataaattggatggtgttgtttgtacagaaattgaccctaagttggacaattattataagaaagacaattcttatttcacagagcaaccaattgatcttgtaccaaaccaaccatatccaaacgcaagcttcgataattttaagtttgtatgtgataatatcaaatttgctgatgatttaaaccagttaactggttataagaaacctgcttcaagagagcttaaagttacatttttccctgacttaaatggtgatgtggtggctattgattataaacactacacaccctcttttaagaaaggagctaaattgttacataaacctattgtttggcatgttaacaatgcaactaataaagccacgtataaaccaaatacctggtgtatacgttgtctttggagcacaaaaccagttgaaacatcaaattcgtttgatgtactgaagtcagaggacgcgcagggaatggataatcttgcctgcgaagatctaaaaccagtctctgaagaagtagtggaaaatcctaccatacagaaagacgttcttgagtgtaatgtgaaaactaccgaagttgtaggagacattatacttaaaccagcaaataatagtttaaaaattacagaagaggttggccacacagatctaatggctgcttatgtagacaattctagtcttactattaagaaacctaatgaattatctagagtattaggtttgaaaacccttgctactcatggtttagctgctgttaatagtgtcccttgggatactatagctaattatgctaagccttttcttaacaaagttgttagtacaactactaacatagttacacggtgtttaaaccgtgtttgtactaattatatgccttatttctttactttattgctacaattgtgtacttttactagaagtacaaattctagaattaaagcatctatgccgactactatagcaaagaatactgttaagagtgtcggtaaattttgtctagaggcttcatttaattatttgaagtcacctaatttttctaaactgataaatattataatttggtttttactattaagtgtttgcctaggttctttaatctactcaaccgctgctttaggtgttttaatgtctaatttaggcatgccttcttactgtactggttacagagaaggctatttgaactctactaatgtcactattgcaacctactgtactggttctataccttgtagtgtttgtcttagtggtttagattctttagacacctatccttctttagaaactatacaaattaccatttcatcttttaaatgggatttaactgcttttggcttagttgcagagtggtttttggcatatattcttttcactaggtttttctatgtacttggattggctgcaatcatgcaattgtttttcagctattttgcagtacattttattagtaattcttggcttatgtggttaataattaatcttgtacaaatggccccgatttcagctatggttagaatgtacatcttctttgcatcattttattatgtatggaaaagttatgtgcatgttgtagacggttgtaattcatcaacttgtatgatgtgttacaaacgtaatagagcaacaagagtcgaatgtacaactattgttaatggtgttagaaggtccttttatgtctatgctaatggaggtaaaggcttttgcaaactacacaattggaattgtgttaattgtgatacattctgtgctggtagtacatttattagtgatgaagttgcgagagacttgtcactacagtttaaaagaccaataaatcctactgaccagtcttcttacatcgttgatagtgttacagtgaagaatggttccatccatctttactttgataaagctggtcaaaagacttatgaaagacattctctctctcattttgttaacttagacaacctgagagctaataacactaaaggttcattgcctattaatgttatagtttttgatggtaaatcaaaatgtgaagaatcatctgcaaaatcagcgtctgtttactacagtcagcttatgtgtcaacctatactgttactagatcaggcattagtgtctgatgttggtgatagtgcggaagttgcagttaaaatgtttgatgcttacgttaatacgttttcatcaacttttaacgtaccaatggaaaaactcaaaacactagttgcaactgcagaagctgaacttgcaaagaatgtgtccttagacaatgtcttatctacttttatttcagcagctcggcaagggtttgttgattcagatgtagaaactaaagatgttgttgaatgtcttaaattgtcacatcaatctgacatagaagttactggcgatagttgtaataactatatgctcacctataacaaagttgaaaacatgacaccccgtgaccttggtgcttgtattgactgtagtgcgcgtcatattaatgcgcaggtagcaaaaagtcacaacattgctttgatatggaacgttaaagatttcatgtcattgtctgaacaactacgaaaacaaatacgtagtgctgctaaaaagaataacttaccttttaagttgacatgtgcaactactagacaagttgttaatgttgtaacaacaaagatagcacttaagggtggtaaaattgttaataattggttgaagcagttaattaaa

SEQ ID NO: 42 - DNA, 7059 bp, Artificial Sequence
  Clone pCC1-4K-SARS-CoV-2-77-4. Based on SARS-CoV-2.
cgggtcccacgtgctagcgctaacataggttgtaaccatacaggtgttgttggagaaggttcggaaggtcttaatgacaaccttcttgaaatactccaaaaagagaaagtcaacatcaatattgttggtgactttaaacttaatgaagagatcgccattattttggcatctttttcggcttccacatcggcttttgtggaaactgtgaaaggtttggattataaagcattcaaacaaattgttgaatcctgtggtaattttaaagttacaaaaggaaaagctaaaaaaggtgcctggaatattggtgaacagaaatcgatactgagtcctctttatgcatttgcatcggaggctgctcgtgttgtacgatcaattttctcgcgcactcttgaaactgctcaaaattctgtgcgtgttttacagaaggccgctataacaatactagatggaatttcgcagtattcactgagactcattgatgctatgatgttcacatcggatttggctactaacaatctagttgtaatggcctacattacaggtggtgttgttcagttgacttcgcagtggctaactaacatctttggcactgtttatgaaaaactcaaacccgtccttgattggcttgaagagaagtttaaggaaggtgtagagtttcttagagacggttgggaaattgttaaatttatctcaacctgtgcttgtgaaattgtcggtggacaaattgtcacctgtgcaaaggaaattaaggagtcggttcagacattctttaagcttgtaaataaatttttggctttgtgtgctgactctatcattattggtggagctaaacttaaagccttgaatttaggtgaaacatttgtcacgcactcgaagggattgtacagaaagtgtgttaaatccagagaagaaactggcctactcatgcctctaaaagccccaaaagaaattatcttcttagagggagaaacacttcccacagaagtgttaacagaggaagttgtcttgaaaactggtgatttacaaccattagaacaacctacttcggaagctgttgaagctccattggttggtacaccagtttgtattaacgggcttatgttgctcgaaatcaaagacacagaaaagtactgtgcccttgcacctaatatgatggtaacaaacaataccttcacactcaaaggcggtgcaccaacaaaggttacttttggtgatgacactgtgatagaagtgcaaggttacaagagtgtgaatatcacttttgaacttgatgaaaggattgataaagtacttaatgagaagtgctcggcctatacagttgaactcggtacagaagtaaatgagttcgcctgtgttgtggcagatgctgtcataaaaactttgcaaccagtatctgaattacttacaccactgggcattgatttagatgagtggtcgatggctacatactacttatttgatgagtctggtgagtttaaattggcttcgcatatgtattgttctttctaccctccagatgaggatgaagaagaaggtgattgtgaagaagaagagtttgagccatcgactcaatatgagtatggtactgaagatgattaccaaggtaaacctttggaatttggtgccacttctgctgctcttcaacctgaagaagagcaagaagaagattggttagatgatgattcgcaacaaactgttggtcaacaagacggcagtgaggacaatcagacaactactattcaaacaattgttgaggttcaacctcaattagagatggaacttacaccagttgttcagactattgaagtgaattcgtttagtggttatttaaaacttactgacaatgtatacattaaaaatgcagacattgtggaagaagctaaaaaggtaaaaccaacagtggttgttaatgcagccaatgtttaccttaaacatggaggaggtgttgcaggagccttaaataaggctactaacaatgccatgcaagttgaatcggatgattacatagctactaatggaccacttaaagtgggtggttcgtgtgttttaagcggacacaatcttgctaaacactgtcttcatgttgtcggcccaaatgttaacaaaggtgaagacattcaacttcttaagtcggcttatgaaaattttaatcagcacgaagttctacttgcaccattattatcagctggtatttttggtgctgaccctatacattcgttaagagtttgtgtagatactgttcgcacaaatgtctacttagctgtctttgataaaaatctctatgacaaacttgtttcatcgtttttggaaatgaagagtgaaaagcaagttgaacaaaagatcgctgagattcctaaagaggaagttaagccatttataactgaatcgaaaccttcagttgaacagagaaaacaagatgataagaaaatcaaagcttgtgttgaagaagttacaacaactctggaagaaactaagttcctcacagaaaacttgttactttatattgacattaatggcaatcttcatccagattcggccactcttgttagtgacattgacatcactttcttaaagaaagatgctccatatatagtgggtgatgttgttcaagagggtgttttaactgctgtggttatacctactaaaaaggctggtggcactactgaaatgctagcgaaagctttgagaaaagtgccaacagacaattatataaccacttacccgggtcagggtttaaatggttacactgtagaggaggcaaagacagtgcttaaaaagtgtaaatcggccttttacattctaccatctattatctcgaatgagaagcaagaaattcttggaactgtttcttggaatttgcgagaaatgcttgcacatgcagaagaaacacgcaaattaatgcctgtctgtgtggaaactaaagccatagtttcgactatacagcgtaaatataagggtattaaaatacaagagggtgtggttgattatggtgctagattttacttttacaccagtaaaacaactgtagcgtcgcttatcaacacacttaacgatctaaatgaaactcttgttacaatgccacttggctatgtaacacatggcttaaatttggaagaagctgctcggtatatgagatctctcaaagtgccagctacagtttcggtttcttcgcctgatgctgttacagcgtataatggttatcttacttcttcgtctaaaacacctgaagaacattttattgaaaccatctcacttgctggttcgtataaagattggtcctattcgggacaatctacacaactaggtatagaatttcttaagagaggtgataaatcggtatattacactagtaatcctaccacattccacctagatggtgaagttatcacctttgacaatcttaagacacttctttcgttgagagaagtgaggactattaaggtgtttacaacagtagacaacattaacctccacacgcaagttgtggacatgtcaatgacatatggacaacagtttggtccaacttatttggatggagctgatgttactaaaataaaacctcataattcgcatgaaggtaaaacattttatgttttacctaatgatgacactctacgtgttgaggcttttgagtactaccacacaactgatcctagttttctgggtaggtacatgtcggcattaaatcacactaaaaagtggaaatacccacaagttaatggtttaacttctattaaatgggcagataacaactgttatcttgccactgcattgttaacactccaacaaatagagttgaagtttaatccacctgctctacaagatgcttattacagagcaagggctggtgaagctgctaacttttgtgcacttatcttagcctactgtaataagacagtaggtgagttaggtgatgttagagaaacaatgtcgtacttgtttcaacatgccaatttagattcttgcaaaagagtcttgaacgtggtgtgtaaaacttgtggacaacagcagacaacccttaagggtgtagaagctgttatgtacatgggcacactttcgtatgaacaatttaagaaaggtgttcagataccttgtacgtgtggtaaacaagctacaaaatatctagtacaacaggagtcaccttttgttatgatgtcggcaccacctgctcagtatgaacttaagcatggtacatttacttgtgctagtgagtacactggtaattaccagtgtggtcactataaacatataacttcgaaagaaactttgtattgcatagacggtgctttacttacaaagtcctcggaatacaaaggtcctattacggatgttttctacaaagaaaacagttacacaacaaccataaaaccagttacttataaattggatggtgttgtttgtacagaaattgaccctaagttggacaattattataagaaagacaattcgtatttcacagagcaaccaattgatcttgtaccaaaccaaccatatccaaacgcaagcttcgataattttaagtttgtatgtgataatatcaaatttgctgatgatttaaaccagttaactggttataagaaacctgcttcgagagagcttaaagttacatttttccctgacttaaatggtgatgtggtggctattgattataaacactacacaccctcttttaagaaaggagctaaattgttacataaacctattgtttggcatgttaacaatgcaactaataaagccacgtataaaccaaatacctggtgtatacgttgtctttggtcgacaaaaccagttgaaacatcaaattcgtttgatgtactgaagtcagaggacgcgcagggaatggataatcttgcctgcgaagatctaaaaccagtctcggaagaagtagtggaaaatcctaccatacagaaagacgttcttgagtgtaatgtgaaaactaccgaagttgtaggagacattatacttaaaccagcaaataatagtttaaaaattacagaagaggttggccacacagatctaatggctgcttatgtagacaattcgagtcttactattaagaaacctaatgaattatctagagtattaggtttgaaaacccttgctactcatggtttagctgctgttaattcggtcccttgggatactatagctaattatgctaagccttttcttaacaaagttgttagtacaactactaacatagttacacggtgtttaaaccgtgtttgtactaattatatgccttatttctttactttattgctacaattgtgtacttttactagatcgacaaattctagaattaaagcatcgatgccgactactatagcaaagaatactgttaagagtgtcggtaaattttgtctagaggcttcgtttaattatttgaagtcacctaatttttcgaaactgataaatattataatttggtttttactattaagtgtttgcctaggttctttaatctactcaaccgctgctttaggtgttttaatgtctaatttaggcatgccttcttactgtactggttacagagaaggctatttgaactctactaatgtcactattgcaacctactgtactggttctataccttgtagtgtttgtcttagtggtttagattctttagacacctatccttctttagaaactatacaaattaccatttcatcttttaaatgggatttaactgcttttggcttagttgcagagtggtttttggcatatattcttttcactaggtttttctatgtacttggattggctgcaatcatgcaattgtttttcagctattttgcagtacattttattagtaattcttggcttatgtggttaataattaatcttgtacaaatggccccgatttcagctatggttagaatgtacatcttctttgcatcattttattatgtatggaaaagttatgtgcatgttgtagacggttgtaattcatcaacttgtatgatgtgttacaaacgtaatagagcaacaagagtcgaatgtacaactattgttaatggtgttagaaggtccttttatgtctatgctaatggaggtaaaggcttttgcaaactacacaattggaattgtgttaattgtgatacattctgtgctggtagtacatttattagtgatgaagttgcgagagacttgtcactacagtttaaaagaccaataaatcctactgaccagtcttcttacatcgttgatagtgttacagtgaagaatggttccatccatctttactttgataaagctggtcaaaagacttatgaaagacattctctctctcattttgttaacttagacaacctgagagctaataacactaaaggttcattgcctattaatgttatagtttttgatggtaaatcaaaatgtgaagaatcatctgcaaaatcagcgtctgtttactacagtcagcttatgtgtcaacctatactgttactagatcaggcattagtgtctgatgttggtgatagtgcggaagttgcagttaaaatgtttgatgcttacgttaatacgttttcatcaacttttaacgtaccaatggaaaaactcaaaacactagttgcaactgcagaagctgaacttgcaaagaatgtgtccttagacaatgtcttatctacttttatttcagcagctcggcaagggtttgttgattcagatgtagaaactaaagatgttgttgaatgtcttaaattgtcacatcaatctgacatagaagttactggcgatagttgtaataactatatgctcacctataacaaagttgaaaacatgacaccccgtgaccttggtgcttgtattgactgtagtgcgcgtcatattaatgcgcaggtagcaaaaagtcacaacattgctttgatatggaacgttaaagatttcatgtcattgtctgaacaactacgaaaacaaatacgtagtgctgctaaaaagaataacttaccttttaagttgacatgtgcaactactagacaagttgttaatgttgtaacaacaaagatagcacttaagggtggtaaaattgttaataattggttgaagcagttaattaaa

SEQ ID NO: 43 - DNA, 7059 bp, Artificial Sequence
  Clone pCC1-4K-SARS-CoV-2-77-5. Based on SARS-CoV-2.
cgggtcccacgtgctagcgctaacataggttgtaaccatacaggtgttgttggagaaggttcggaaggtcttaatgacaaccttcttgaaatactccaaaaagagaaagtcaacatcaatattgttggtgactttaaacttaatgaagagatcgccattattttggcatctttttcggcttccacatcggcttttgtggaaactgtgaaaggtttggattataaagcattcaaacaaattgttgaatcctgtggtaattttaaagttacaaaaggaaaagctaaaaaaggtgcctggaatattggtgaacagaaatcgatactgagtcctctttatgcatttgcatcggaggctgctcgtgttgtacgatcaattttctcgcgcactcttgaaactgctcaaaattctgtgcgtgttttacagaaggccgctataacaatactagatggaatttcgcagtattcactgagactcattgatgctatgatgttcacatcggatttggctactaacaatctagttgtaatggcctacattacaggtggtgttgttcagttgacttcgcagtggctaactaacatctttggcactgtttatgaaaaactcaaacccgtccttgattggcttgaagagaagtttaaggaaggtgtagagtttcttagagacggttgggaaattgttaaatttatctcaacctgtgcttgtgaaattgtcggtggacaaattgtcacctgtgcaaaggaaattaaggagtcggttcagacattctttaagcttgtaaataaatttttggctttgtgtgctgactctatcattattggtggagctaaacttaaagccttgaatttaggtgaaacatttgtcacgcactcgaagggattgtacagaaagtgtgttaaatccagagaagaaactggcctactcatgcctctaaaagccccaaaagaaattatcttcttagagggagaaacacttcccacagaagtgttaacagaggaagttgtcttgaaaactggtgatttacaaccattagaacaacctacttcggaagctgttgaagctccattggttggtacaccagtttgtattaacgggcttatgttgctcgaaatcaaagacacagaaaagtactgtgcccttgcacctaatatgatggtaacaaacaataccttcacactcaaaggcggtgcaccaacaaaggttacttttggtgatgacactgtgatagaagtgcaaggttacaagagtgtgaatatcacttttgaacttgatgaaaggattgataaagtacttaatgagaagtgctcggcctatacagttgaactcggtacagaagtaaatgagttcgcctgtgttgtggcagatgctgtcataaaaactttgcaaccagtatctgaattacttacaccactgggcattgatttagatgagtggtcgatggctacatactacttatttgatgagtctggtgagtttaaattggcttcgcatatgtattgttctttctaccctccagatgaggatgaagaagaaggtgattgtgaagaagaagagtttgagccatcgactcaatatgagtatggtactgaagatgattaccaaggtaaacctttggaatttggtgccacttctgctgctcttcaacctgaagaagagcaagaagaagattggttagatgatgattcgcaacaaactgttggtcaacaagacggcagtgaggacaatcagacaactactattcaaacaattgttgaggttcaacctcaattagagatggaacttacaccagttgttcagactattgaagtgaattcgtttagtggttatttaaaacttactgacaatgtatacattaaaaatgcagacattgtggaagaagctaaaaaggtaaaaccaacagtggttgttaatgcagccaatgtttaccttaaacatggaggaggtgttgcaggagccttaaataaggctactaacaatgccatgcaagttgaatcggatgattacatagctactaatggaccacttaaagtgggtggttcgtgtgttttaagcggacacaatcttgctaaacactgtcttcatgttgtcggcccaaatgttaacaaaggtgaagacattcaacttcttaagtcggcttatgaaaattttaatcagcacgaagttctacttgcaccattattatcagctggtatttttggtgctgaccctatacattcgttaagagtttgtgtagatactgttcgcacaaatgtctacttagctgtctttgataaaaatctctatgacaaacttgtttcatcgtttttggaaatgaagagtgaaaagcaagttgaacaaaagatcgctgagattcctaaagaggaagttaagccatttataactgaatcgaaaccttcagttgaacagagaaaacaagatgataagaaaatcaaagcttgtgttgaagaagttacaacaactctggaagaaactaagttcctcacagaaaacttgttactttatattgacattaatggcaatcttcatccagattcggccactcttgttagtgacattgacatcactttcttaaagaaagatgctccatatatagtgggtgatgttgttcaagagggtgttttaactgctgtggttatacctactaaaaaggctggtggcactactgaaatgctagcgaaagctttgagaaaagtgccaacagacaattatataaccacttacccgggtcagggtttaaatggttacactgtagaggaggcaaagacagtgcttaaaaagtgtaaaagtgccttttacattctaccatctattatctctaatgagaagcaagaaattcttggaactgtttcttggaatttgcgagaaatgcttgcacatgcagaagaaacacgcaaattaatgcctgtctgtgtggaaactaaagccatagtttcaactatacagcgtaaatataagggtattaaaatacaagagggtgtggttgattatggtgctagattttacttttacaccagtaaaacaactgtagcgtcacttatcaacacacttaacgatctaaatgaaactcttgttacaatgccacttggctatgtaacacatggcttaaatttggaagaagctgctcggtatatgagatctctcaaagtgccagctacagtttctgtttcttcacctgatgctgttacagcgtataatggttatcttacttcttcttctaaaacacctgaagaacattttattgaaaccatctcacttgctggttcctataaagattggtcctattctggacaatctacacaactaggtatagaatttcttaagagaggtgataaaagtgtatattacactagtaatcctaccacattccacctagatggtgaagttatcacctttgacaatcttaagacacttctttctttgagagaagtgaggactattaaggtgtttacaacagtagacaacattaacctccacacgcaagttgtggacatgtcaatgacatatggacaacagtttggtccaacttatttggatggagctgatgttactaaaataaaacctcataattcacatgaaggtaaaacattttatgttttacctaatgatgacactctacgtgttgaggcttttgagtactaccacacaactgatcctagttttctgggtaggtacatgtcagcattaaatcacactaaaaagtggaaatacccacaagttaatggtttaacttctattaaatgggcagataacaactgttatcttgccactgcattgttaacactccaacaaatagagttgaagtttaatccacctgctctacaagatgcttattacagagcaagggctggtgaagctgctaacttttgtgcacttatcttagcctactgtaataagacagtaggtgagttaggtgatgttagagaaacaatgagttacttgtttcaacatgccaatttagattcttgcaaaagagtcttgaacgtggtgtgtaaaacttgtggacaacagcagacaacccttaagggtgtagaagctgttatgtacatgggcacactttcttatgaacaatttaagaaaggtgttcagataccttgtacgtgtggtaaacaagctacaaaatatctagtacaacaggagtcaccttttgttatgatgtcagcaccacctgctcagtatgaacttaagcatggtacatttacttgtgctagtgagtacactggtaattaccagtgtggtcactataaacatataacttctaaagaaactttgtattgcatagacggtgctttacttacaaagtcctcagaatacaaaggtcctattacggatgttttctacaaagaaaacagttacacaacaaccataaaaccagttacttataaattggatggtgttgtttgtacagaaattgaccctaagttggacaattattataagaaagacaattcttatttcacagagcaaccaattgatcttgtaccaaaccaaccatatccaaacgcaagcttcgataattttaagtttgtatgtgataatatcaaatttgctgatgatttaaaccagttaactggttataagaaacctgcttcaagagagcttaaagttacatttttccctgacttaaatggtgatgtggtggctattgattataaacactacacaccctcttttaagaaaggagctaaattgttacataaacctattgtttggcatgttaacaatgcaactaataaagccacgtataaaccaaatacctggtgtatacgttgtctttggagcacaaaaccagttgaaacatcaaattcgtttgatgtactgaagtcagaggacgcgcagggaatggataatcttgcctgcgaagatctaaaaccagtctctgaagaagtagtggaaaatcctaccatacagaaagacgttcttgagtgtaatgtgaaaactaccgaagttgtaggagacattatacttaaaccagcaaataatagtttaaaaattacagaagaggttggccacacagatctaatggctgcttatgtagacaattctagtcttactattaagaaacctaatgaattatctagagtattaggtttgaaaacccttgctactcatggtttagctgctgttaatagtgtcccttgggatactatagctaattatgctaagccttttcttaacaaagttgttagtacaactactaacatagttacacggtgtttaaaccgtgtttgtactaattatatgccttatttctttactttattgctacaattgtgtacttttactagaagtacaaattctagaattaaagcatctatgccgactactatagcaaagaatactgttaagagtgtcggtaaattttgtctagaggcttcatttaattatttgaagtcacctaatttttctaaactgataaatattataatttggtttttactattaagtgtttgcctaggttcgttaatctactcaaccgctgctttaggtgttttaatgtcgaatttaggcatgccttcttactgtactggttacagagaaggctatttgaactcgactaatgtcactattgcaacctactgtactggttctataccttgttcggtttgtcttagtggtttagattctttagacacctatccttcgttagaaactatacaaattaccatttcatcttttaaatgggatttaactgcttttggcttagttgcagagtggtttttggcatatattcttttcactaggtttttctatgtacttggattggctgcaatcatgcaattgtttttctcgtattttgcagtacattttattagtaattcgtggcttatgtggttaataattaatcttgtacaaatggccccgatttcagctatggttagaatgtacatcttctttgcatcgttttattatgtatggaaaagttatgtgcatgttgtagacggttgtaattcgtcaacttgtatgatgtgttacaaacgtaatagagcaacaagagtcgaatgtacaactattgttaatggtgttagaaggtcgttttatgtctatgctaatggaggtaaaggcttttgcaaactacacaattggaattgtgttaattgtgatacattctgtgctggtagtacatttatttcggatgaagttgcgagagacttgtcactacagtttaaaagaccaataaatcctactgaccagtcgtcttacatcgttgatagtgttacagtgaagaatggttcgatccatctttactttgataaagctggtcaaaagacttatgaaagacattctctctcgcattttgttaacttagacaacctgagagctaataacactaaaggttcattgcctattaatgttatagtttttgatggtaaatcgaaatgtgaagaatcatcggcaaaatcagcgtcggtttactacagtcagcttatgtgtcaacctatactgttactagatcaggcattagtgtcggatgttggtgatagtgcggaagttgcagttaaaatgtttgatgcttacgttaatacgttttcgtcaacttttaacgtaccaatggaaaaactcaaaacactagttgcaactgcagaagctgaacttgcaaagaatgtgtccttagacaatgtcttatcgacttttatttcagcagctcggcaagggtttgttgattcggatgtagaaactaaagatgttgttgaatgtcttaaattgtcacatcaatcggacatagaagttactggcgatagttgtaataactatatgctcacctataacaaagttgaaaacatgacaccccgtgaccttggtgcttgtattgactgttcggcgcgtcatattaatgcgcaggtagcaaaaagtcacaacattgctttgatatggaacgttaaagatttcatgtcgttgtctgaacaactacgaaaacaaatacgttcggctgctaaaaagaataacttaccttttaagttgacatgtgcaactactagacaagttgttaatgttgtaacaacaaagatagcacttaagggtggtaaaattgttaataattggttgaagcagttaattaaa

SEQ ID NO: 44 - DNA, 7059 bp, Artificial Sequence
  Clone pCC1-4K-SARS-CoV-2-77-6. Based on SARS-CoV-2.
cgggtcccacgtgctagcgctaacataggttgtaaccatacaggtgttgttggagaaggttccgaaggtcttaatgacaaccttcttgaaatactccaaaaagagaaagtcaacatcaatattgttggtgactttaaacttaatgaagagatcgccattattttggcatctttttctgcttccacaagtgcttttgtggaaactgtgaaaggtttggattataaagcattcaaacaaattgttgaatcctgtggtaattttaaagttacaaaaggaaaagctaaaaaaggtgcctggaatattggtgaacagaaatcaatactgagtcctctttatgcatttgcatcagaggctgctcgtgttgtacgatcaattttctcccgcactcttgaaactgctcaaaattctgtgcgtgttttacagaaggccgctataacaatactagatggaatttcacagtattcactgagactcattgatgctatgatgttcacatctgatttggctactaacaatctagttgtaatggcctacattacaggtggtgttgttcagttgacttcgcagtggctaactaacatctttggcactgtttatgaaaaactcaaacccgtccttgattggcttgaagagaagtttaaggaaggtgtagagtttcttagagacggttgggaaattgttaaatttatctcaacctgtgcttgtgaaattgtcggtggacaaattgtcacctgtgcaaaggaaattaaggagagtgttcagacattctttaagcttgtaaataaatttttggctttgtgtgctgactctatcattattggtggagctaaacttaaagccttgaatttaggtgaaacatttgtcacgcactcaaagggattgtacagaaagtgtgttaaatccagagaagaaactggcctactcatgcctctaaaagccccaaaagaaattatcttcttagagggagaaacacttcccacagaagtgttaacagaggaagttgtcttgaaaactggtgatttacaaccattagaacaacctactagtgaagctgttgaagctccattggttggtacaccagtttgtattaacgggcttatgttgctcgaaatcaaagacacagaaaagtactgtgcccttgcacctaatatgatggtaacaaacaataccttcacactcaaaggcggtgcaccaacaaaggttacttttggtgatgacactgtgatagaagtgcaaggttacaagagtgtgaatatcacttttgaacttgatgaaaggattgataaagtacttaatgagaagtgctctgcctatacagttgaactcggtacagaagtaaatgagttcgcctgtgttgtggcagatgctgtcataaaaactttgcaaccagtatctgaattacttacaccactgggcattgatttagatgagtggagtatggctacatactacttatttgatgagtctggtgagtttaaattggcttcacatatgtattgttctttctaccctccagatgaggatgaagaagaaggtgattgtgaagaagaagagtttgagccatcaactcaatatgagtatggtactgaagatgattaccaaggtaaacctttggaatttggtgccacttctgctgctcttcaacctgaagaagagcaagaagaagattggttagatgatgatagtcaacaaactgttggtcaacaagacggcagtgaggacaatcagacaactactattcaaacaattgttgaggttcaacctcaattagagatggaacttacaccagttgttcagactattgaagtgaatagttttagtggttatttaaaacttactgacaatgtatacattaaaaatgcagacattgtggaagaagctaaaaaggtaaaaccaacagtggttgttaatgcagccaatgtttaccttaaacatggaggaggtgttgcaggagccttaaataaggctactaacaatgccatgcaagttgaatctgatgattacatagctactaatggaccacttaaagtgggtggtagttgtgttttaagcggacacaatcttgctaaacactgtcttcatgttgtcggcccaaatgttaacaaaggtgaagacattcaacttcttaagagtgcttatgaaaattttaatcagcacgaagttctacttgcaccattattatcagctggtatttttggtgctgaccctatacattctttaagagtttgtgtagatactgttcgcacaaatgtctacttagctgtctttgataaaaatctctatgacaaacttgtttcaagctttttggaaatgaagagtgaaaagcaagttgaacaaaagatcgctgagattcctaaagaggaagttaagccatttataactgaaagtaaaccttcagttgaacagagaaaacaagatgataagaaaatcaaagcttgtgttgaagaagttacaacaactctggaagaaactaagttcctcacagaaaacttgttactttatattgacattaatggcaatcttcatccagattctgccactcttgttagtgacattgacatcactttcttaaagaaagatgctccatatatagtgggtgatgttgttcaagagggtgttttaactgctgtggttatacctactaaaaaggctggtggcactactgaaatgctagcgaaagctttgagaaaagtgccaacagacaattatataaccacttacccgggtcagggtttaaatggttacactgtagaggaggcaaagacagtgcttaaaaagtgtaaatcggccttttacattctaccatctattatctcgaatgagaagcaagaaattcttggaactgtttcttggaatttgcgagaaatgcttgcacatgcagaagaaacacgcaaattaatgcctgtctgtgtggaaactaaagccatagtttcgactatacagcgtaaatataagggtattaaaatacaagagggtgtggttgattatggtgctagattttacttttacaccagtaaaacaactgtagcgtcgcttatcaacacacttaacgatctaaatgaaactcttgttacaatgccacttggctatgtaacacatggcttaaatttggaagaagctgctcggtatatgagatctctcaaagtgccagctacagtttcggtttcttcgcctgatgctgttacagcgtataatggttatcttacttcttcgtctaaaacacctgaagaacattttattgaaaccatctcacttgctggttcgtataaagattggtcctattcgggacaatctacacaactaggtatagaatttcttaagagaggtgataaatcggtatattacactagtaatcctaccacattccacctagatggtgaagttatcacctttgacaatcttaagacacttctttcgttgagagaagtgaggactattaaggtgtttacaacagtagacaacattaacctccacacgcaagttgtggacatgtcaatgacatatggacaacagtttggtccaacttatttggatggagctgatgttactaaaataaaacctcataattcgcatgaaggtaaaacattttatgttttacctaatgatgacactctacgtgttgaggcttttgagtactaccacacaactgatcctagttttctgggtaggtacatgtcggcattaaatcacactaaaaagtggaaatacccacaagttaatggtttaacttctattaaatgggcagataacaactgttatcttgccactgcattgttaacactccaacaaatagagttgaagtttaatccacctgctctacaagatgcttattacagagcaagggctggtgaagctgctaacttttgtgcacttatcttagcctactgtaataagacagtaggtgagttaggtgatgttagagaaacaatgtcgtacttgtttcaacatgccaatttagattcttgcaaaagagtcttgaacgtggtgtgtaaaacttgtggacaacagcagacaacccttaagggtgtagaagctgttatgtacatgggcacactttcgtatgaacaatttaagaaaggtgttcagataccttgtacgtgtggtaaacaagctacaaaatatctagtacaacaggagtcaccttttgttatgatgtcggcaccacctgctcagtatgaacttaagcatggtacatttacttgtgctagtgagtacactggtaattaccagtgtggtcactataaacatataacttcgaaagaaactttgtattgcatagacggtgctttacttacaaagtcctcggaatacaaaggtcctattacggatgttttctacaaagaaaacagttacacaacaaccataaaaccagttacttataaattggatggtgttgtttgtacagaaattgaccctaagttggacaattattataagaaagacaattcgtatttcacagagcaaccaattgatcttgtaccaaaccaaccatatccaaacgcaagcttcgataattttaagtttgtatgtgataatatcaaatttgctgatgatttaaaccagttaactggttataagaaacctgcttcgagagagcttaaagttacatttttccctgacttaaatggtgatgtggtggctattgattataaacactacacaccctcttttaagaaaggagctaaattgttacataaacctattgtttggcatgttaacaatgcaactaataaagccacgtataaaccaaatacctggtgtatacgttgtctttggtcgacaaaaccagttgaaacatcaaattcgtttgatgtactgaagtcagaggacgcgcagggaatggataatcttgcctgcgaagatctaaaaccagtctcggaagaagtagtggaaaatcctaccatacagaaagacgttcttgagtgtaatgtgaaaactaccgaagttgtaggagacattatacttaaaccagcaaataatagtttaaaaattacagaagaggttggccacacagatctaatggctgcttatgtagacaattcgagtcttactattaagaaacctaatgaattatctagagtattaggtttgaaaacccttgctactcatggtttagctgctgttaattcggtcccttgggatactatagctaattatgctaagccttttcttaacaaagttgttagtacaactactaacatagttacacggtgtttaaaccgtgtttgtactaattatatgccttatttctttactttattgctacaattgtgtacttttactagatcgacaaattctagaattaaagcatcgatgccgactactatagcaaagaatactgttaagagtgtcggtaaattttgtctagaggcttcgtttaattatttgaagtcacctaatttttcgaaactgataaatattataatttggtttttactattaagtgtttgcctaggttcgttaatctactcaaccgctgctttaggtgttttaatgtcgaatttaggcatgccttcttactgtactggttacagagaaggctatttgaactcgactaatgtcactattgcaacctactgtactggttctataccttgttcggtttgtcttagtggtttagattctttagacacctatccttcgttagaaactatacaaattaccatttcatcttttaaatgggatttaactgcttttggcttagttgcagagtggtttttggcatatattcttttcactaggtttttctatgtacttggattggctgcaatcatgcaattgtttttctcgtattttgcagtacattttattagtaattcgtggcttatgtggttaataattaatcttgtacaaatggccccgatttcagctatggttagaatgtacatcttctttgcatcgttttattatgtatggaaaagttatgtgcatgttgtagacggttgtaattcgtcaacttgtatgatgtgttacaaacgtaatagagcaacaagagtcgaatgtacaactattgttaatggtgttagaaggtcgttttatgtctatgctaatggaggtaaaggcttttgcaaactacacaattggaattgtgttaattgtgatacattctgtgctggtagtacatttatttcggatgaagttgcgagagacttgtcactacagtttaaaagaccaataaatcctactgaccagtcgtcttacatcgttgatagtgttacagtgaagaatggttcgatccatctttactttgataaagctggtcaaaagacttatgaaagacattctctctcgcattttgttaacttagacaacctgagagctaataacactaaaggttcattgcctattaatgttatagtttttgatggtaaatcgaaatgtgaagaatcatcggcaaaatcagcgtcggtttactacagtcagcttatgtgtcaacctatactgttactagatcaggcattagtgtcggatgttggtgatagtgcggaagttgcagttaaaatgtttgatgcttacgttaatacgttttcgtcaacttttaacgtaccaatggaaaaactcaaaacactagttgcaactgcagaagctgaacttgcaaagaatgtgtccttagacaatgtcttatcgacttttatttcagcagctcggcaagggtttgttgattcggatgtagaaactaaagatgttgttgaatgtcttaaattgtcacatcaatcggacatagaagttactggcgatagttgtaataactatatgctcacctataacaaagttgaaaacatgacaccccgtgaccttggtgcttgtattgactgttcggcgcgtcatattaatgcgcaggtagcaaaaagtcacaacattgctttgatatggaacgttaaagatttcatgtcgttgtctgaacaactacgaaaacaaatacgttcggctgctaaaaagaataacttaccttttaagttgacatgtgcaactactagacaagttgttaatgttgtaacaacaaagatagcacttaagggtggtaaaattgttaataattggttgaagcagttaattaaa

SEQ ID NO: 45 - DNA, 7059 bp, Artificial Sequence
  Clone pCC1-4K-SARS-CoV-2-77-7. Based on SARS-CoV-2.
cgggtcccacgtgctagcgctaacataggttgtaaccatacaggtgttgttggagaaggttcggaaggtcttaatgacaaccttcttgaaatactccaaaaagagaaagtcaacatcaatattgttggtgactttaaacttaatgaagagatcgccattattttggcatctttttcggcttccacatcggcttttgtggaaactgtgaaaggtttggattataaagcattcaaacaaattgttgaatcctgtggtaattttaaagttacaaaaggaaaagctaaaaaaggtgcctggaatattggtgaacagaaatcgatactgagtcctctttatgcatttgcatcggaggctgctcgtgttgtacgatcaattttctcgcgcactcttgaaactgctcaaaattctgtgcgtgttttacagaaggccgctataacaatactagatggaatttcgcagtattcactgagactcattgatgctatgatgttcacatcggatttggctactaacaatctagttgtaatggcctacattacaggtggtgttgttcagttgacttcgcagtggctaactaacatctttggcactgtttatgaaaaactcaaacccgtccttgattggcttgaagagaagtttaaggaaggtgtagagtttcttagagacggttgggaaattgttaaatttatctcaacctgtgcttgtgaaattgtcggtggacaaattgtcacctgtgcaaaggaaattaaggagtcggttcagacattctttaagcttgtaaataaatttttggctttgtgtgctgactctatcattattggtggagctaaacttaaagccttgaatttaggtgaaacatttgtcacgcactcgaagggattgtacagaaagtgtgttaaatccagagaagaaactggcctactcatgcctctaaaagccccaaaagaaattatcttcttagagggagaaacacttcccacagaagtgttaacagaggaagttgtcttgaaaactggtgatttacaaccattagaacaacctacttcggaagctgttgaagctccattggttggtacaccagtttgtattaacgggcttatgttgctcgaaatcaaagacacagaaaagtactgtgcccttgcacctaatatgatggtaacaaacaataccttcacactcaaaggcggtgcaccaacaaaggttacttttggtgatgacactgtgatagaagtgcaaggttacaagagtgtgaatatcacttttgaacttgatgaaaggattgataaagtacttaatgagaagtgctcggcctatacagttgaactcggtacagaagtaaatgagttcgcctgtgttgtggcagatgctgtcataaaaactttgcaaccagtatctgaattacttacaccactgggcattgatttagatgagtggtcgatggctacatactacttatttgatgagtctggtgagtttaaattggcttcgcatatgtattgttctttctaccctccagatgaggatgaagaagaaggtgattgtgaagaagaagagtttgagccatcgactcaatatgagtatggtactgaagatgattaccaaggtaaacctttggaatttggtgccacttctgctgctcttcaacctgaagaagagcaagaagaagattggttagatgatgattcgcaacaaactgttggtcaacaagacggcagtgaggacaatcagacaactactattcaaacaattgttgaggttcaacctcaattagagatggaacttacaccagttgttcagactattgaagtgaattcgtttagtggttatttaaaacttactgacaatgtatacattaaaaatgcagacattgtggaagaagctaaaaaggtaaaaccaacagtggttgttaatgcagccaatgtttaccttaaacatggaggaggtgttgcaggagccttaaataaggctactaacaatgccatgcaagttgaatcggatgattacatagctactaatggaccacttaaagtgggtggttcgtgtgttttaagcggacacaatcttgctaaacactgtcttcatgttgtcggcccaaatgttaacaaaggtgaagacattcaacttcttaagtcggcttatgaaaattttaatcagcacgaagttctacttgcaccattattatcagctggtatttttggtgctgaccctatacattcgttaagagtttgtgtagatactgttcgcacaaatgtctacttagctgtctttgataaaaatctctatgacaaacttgtttcatcgtttttggaaatgaagagtgaaaagcaagttgaacaaaagatcgctgagattcctaaagaggaagttaagccatttataactgaatcgaaaccttcagttgaacagagaaaacaagatgataagaaaatcaaagcttgtgttgaagaagttacaacaactctggaagaaactaagttcctcacagaaaacttgttactttatattgacattaatggcaatcttcatccagattcggccactcttgttagtgacattgacatcactttcttaaagaaagatgctccatatatagtgggtgatgttgttcaagagggtgttttaactgctgtggttatacctactaaaaaggctggtggcactactgaaatgctagcgaaagctttgagaaaagtgccaacagacaattatataaccacttacccgggtcagggtttaaatggttacactgtagaggaggcaaagacagtgcttaaaaagtgtaaatcggccttttacattctaccatctattatctcgaatgagaagcaagaaattcttggaactgtttcttggaatttgcgagaaatgcttgcacatgcagaagaaacacgcaaattaatgcctgtctgtgtggaaactaaagccatagtttcgactatacagcgtaaatataagggtattaaaatacaagagggtgtggttgattatggtgctagattttacttttacaccagtaaaacaactgtagcgtcgcttatcaacacacttaacgatctaaatgaaactcttgttacaatgccacttggctatgtaacacatggcttaaatttggaagaagctgctcggtatatgagatctctcaaagtgccagctacagtttcggtttcttcgcctgatgctgttacagcgtataatggttatcttacttcttcgtctaaaacacctgaagaacattttattgaaaccatctcacttgctggttcgtataaagattggtcctattcgggacaatctacacaactaggtatagaatttcttaagagaggtgataaatcggtatattacactagtaatcctaccacattccacctagatggtgaagttatcacctttgacaatcttaagacacttctttcgttgagagaagtgaggactattaaggtgtttacaacagtagacaacattaacctccacacgcaagttgtggacatgtcaatgacatatggacaacagtttggtccaacttatttggatggagctgatgttactaaaataaaacctcataattcgcatgaaggtaaaacattttatgttttacctaatgatgacactctacgtgttgaggcttttgagtactaccacacaactgatcctagttttctgggtaggtacatgtcggcattaaatcacactaaaaagtggaaatacccacaagttaatggtttaacttctattaaatgggcagataacaactgttatcttgccactgcattgttaacactccaacaaatagagttgaagtttaatccacctgctctacaagatgcttattacagagcaagggctggtgaagctgctaacttttgtgcacttatcttagcctactgtaataagacagtaggtgagttaggtgatgttagagaaacaatgtcgtacttgtttcaacatgccaatttagattcttgcaaaagagtcttgaacgtggtgtgtaaaacttgtggacaacagcagacaacccttaagggtgtagaagctgttatgtacatgggcacactttcgtatgaacaatttaagaaaggtgttcagataccttgtacgtgtggtaaacaagctacaaaatatctagtacaacaggagtcaccttttgttatgatgtcggcaccacctgctcagtatgaacttaagcatggtacatttacttgtgctagtgagtacactggtaattaccagtgtggtcactataaacatataacttcgaaagaaactttgtattgcatagacggtgctttacttacaaagtcctcggaatacaaaggtcctattacggatgttttctacaaagaaaacagttacacaacaaccataaaaccagttacttataaattggatggtgttgtttgtacagaaattgaccctaagttggacaattattataagaaagacaattcgtatttcacagagcaaccaattgatcttgtaccaaaccaaccatatccaaacgcaagcttcgataattttaagtttgtatgtgataatatcaaatttgctgatgatttaaaccagttaactggttataagaaacctgcttcgagagagcttaaagttacatttttccctgacttaaatggtgatgtggtggctattgattataaacactacacaccctcttttaagaaaggagctaaattgttacataaacctattgtttggcatgttaacaatgcaactaataaagccacgtataaaccaaatacctggtgtatacgttgtctttggtcgacaaaaccagttgaaacatcaaattcgtttgatgtactgaagtcagaggacgcgcagggaatggataatcttgcctgcgaagatctaaaaccagtctcggaagaagtagtggaaaatcctaccatacagaaagacgttcttgagtgtaatgtgaaaactaccgaagttgtaggagacattatacttaaaccagcaaataatagtttaaaaattacagaagaggttggccacacagatctaatggctgcttatgtagacaattcgagtcttactattaagaaacctaatgaattatctagagtattaggtttgaaaacccttgctactcatggtttagctgctgttaattcggtcccttgggatactatagctaattatgctaagccttttcttaacaaagttgttagtacaactactaacatagttacacggtgtttaaaccgtgtttgtactaattatatgccttatttctttactttattgctacaattgtgtacttttactagatcgacaaattctagaattaaagcatcgatgccgactactatagcaaagaatactgttaagagtgtcggtaaattttgtctagaggcttcgtttaattatttgaagtcacctaatttttcgaaactgataaatattataatttggtttttactattaagtgtttgcctaggttcgttaatctactcaaccgctgctttaggtgttttaatgtcgaatttaggcatgccttcttactgtactggttacagagaaggctatttgaactcgactaatgtcactattgcaacctactgtactggttctataccttgttcggtttgtcttagtggtttagattctttagacacctatccttcgttagaaactatacaaattaccatttcatcttttaaatgggatttaactgcttttggcttagttgcagagtggtttttggcatatattcttttcactaggtttttctatgtacttggattggctgcaatcatgcaattgtttttctcgtattttgcagtacattttattagtaattcgtggcttatgtggttaataattaatcttgtacaaatggccccgatttcagctatggttagaatgtacatcttctttgcatcgttttattatgtatggaaaagttatgtgcatgttgtagacggttgtaattcgtcaacttgtatgatgtgttacaaacgtaatagagcaacaagagtcgaatgtacaactattgttaatggtgttagaaggtcgttttatgtctatgctaatggaggtaaaggcttttgcaaactacacaattggaattgtgttaattgtgatacattctgtgctggtagtacatttatttcggatgaagttgcgagagacttgtcactacagtttaaaagaccaataaatcctactgaccagtcgtcttacatcgttgatagtgttacagtgaagaatggttcgatccatctttactttgataaagctggtcaaaagacttatgaaagacattctctctcgcattttgttaacttagacaacctgagagctaataacactaaaggttcattgcctattaatgttatagtttttgatggtaaatcgaaatgtgaagaatcatcggcaaaatcagcgtcggtttactacagtcagcttatgtgtcaacctatactgttactagatcaggcattagtgtcggatgttggtgatagtgcggaagttgcagttaaaatgtttgatgcttacgttaatacgttttcgtcaacttttaacgtaccaatggaaaaactcaaaacactagttgcaactgcagaagctgaacttgcaaagaatgtgtccttagacaatgtcttatcgacttttatttcagcagctcggcaagggtttgttgattcggatgtagaaactaaagatgttgttgaatgtcttaaattgtcacatcaatcggacatagaagttactggcgatagttgtaataactatatgctcacctataacaaagttgaaaacatgacaccccgtgaccttggtgcttgtattgactgttcggcgcgtcatattaatgcgcaggtagcaaaaagtcacaacattgctttgatatggaacgttaaagatttcatgtcgttgtctgaacaactacgaaaacaaatacgttcggctgctaaaaagaataacttaccttttaagttgacatgtgcaactactagacaagttgttaatgttgtaacaacaaagatagcacttaagggtggtaaaattgttaataattggttgaagcagttaattaaa

SEQ ID NO: 46 - DNA, 7059 bp, Artificial Sequence
  Clone pCC1-4K-SARS-CoV-2-160-1. Based on SARS-CoV-2.
cgggtcccacgtgctagcgctaacataggttgtaaccatacaggtgttgttggagaaggttccgaaggtcttaatgacaaccttcttgaaatactccaaaaagagaaagtcaacatcaatattgttggtgactttaaacttaatgaagagatcgccattattttggcatctttttctgcttccacaagtgcttttgtggaaactgtgaaaggtttggattataaagcattcaaacaaattgttgaatcctgtggtaattttaaagttacaaaaggaaaagctaaaaaaggtgcctggaatattggtgaacagaaatcaatactgagtcctctttatgcatttgcatcagaggctgctcgtgttgtacgatcaattttctcccgcactcttgaaactgctcaaaattctgtgcgtgttttacagaaggccgctataacaatactagatggaatttcacagtattcactgagactcattgatgctatgatgttcacatctgatttggctactaacaatctagttgtaatggcctacattacaggtggtgttgttcagttgacttcgcagtggctaactaacatctttggcactgtttatgaaaaactcaaacccgtccttgattggcttgaagagaagtttaaggaaggtgtagagtttcttagagacggttgggaaattgttaaatttatctcaacctgtgcttgtgaaattgtcggtggacaaattgtcacctgtgcaaaggaaattaaggagagtgttcagacattctttaagcttgtaaataaatttttggctttgtgtgctgactctatcattattggtggagctaaacttaaagccttgaatttaggtgaaacatttgtcacgcactcaaagggattgtacagaaagtgtgttaaatccagagaagaaactggcctactcatgcctctaaaagccccaaaagaaattatcttcttagagggagaaacacttcccacagaagtgttaacagaggaagttgtcttgaaaactggtgatttacaaccattagaacaacctactagtgaagctgttgaagctccattggttggtacaccagtttgtattaacgggcttatgttgctcgaaatcaaagacacagaaaagtactgtgcccttgcacctaatatgatggtaacaaacaataccttcacactcaaaggcggtgcaccaacaaaggttacttttggtgatgacactgtgatagaagtgcaaggttacaagagtgtgaatatcacttttgaacttgatgaaaggattgataaagtacttaatgagaagtgctctgcctatacagttgaactcggtacagaagtaaatgagttcgcctgtgttgtggcagatgctgtcataaaaactttgcaaccagtatctgaattacttacaccactgggcattgatttagatgagtggagtatggctacatactacttatttgatgagtctggtgagtttaaattggcttcacatatgtattgttctttctaccctccagatgaggatgaagaagaaggtgattgtgaagaagaagagtttgagccatcaactcaatatgagtatggtactgaagatgattaccaaggtaaacctttggaatttggtgccacttctgctgctcttcaacctgaagaagagcaagaagaagattggttagatgatgatagtcaacaaactgttggtcaacaagacggcagtgaggacaatcagacaactactattcaaacaattgttgaggttcaacctcaattagagatggaacttacaccagttgttcagactattgaagtgaatagttttagtggttatttaaaacttactgacaatgtatacattaaaaatgcagacattgtggaagaagctaaaaaggtaaaaccaacagtggttgttaatgcagccaatgtttaccttaaacatggaggaggtgttgcaggagccttaaataaggctactaacaatgccatgcaagttgaatctgatgattacatagctactaatggaccacttaaagtgggtggtagttgtgttttaagcggacacaatcttgctaaacactgtcttcatgttgtcggcccaaatgttaacaaaggtgaagacattcaacttcttaagagtgcttatgaaaattttaatcagcacgaagttctacttgcaccattattatcagctggtatttttggtgctgaccctatacattctttaagagtttgtgtagatactgttcgcacaaatgtctacttagctgtctttgataaaaatctctatgacaaacttgtttcaagctttttggaaatgaagagtgaaaagcaagttgaacaaaagatcgctgagattcctaaagaggaagttaagccatttataactgaaagtaaaccttcagttgaacagagaaaacaagatgataagaaaatcaaagcttgtgttgaagaagttacaacaactctggaagaaactaagttcctcacagaaaacttgttactttatattgacattaatggcaatcttcatccagattctgccactcttgttagtgacattgacatcactttcttaaagaaagatgctccatatatagtgggtgatgttgttcaagagggtgttttaactgctgtggttatacctactaaaaaggctggtggcactactgaaatgctagcgaaagctttgagaaaagtgccaacagacaattatataaccacttacccgggtcagggtttaaatggttacactgtagaggaggcaaagacagtgcttaaaaagtgtaaaagtgccttttacattctaccatctattatctctaatgagaagcaagaaattcttggaactgtttcttggaatttgcgagaaatgcttgcacatgcagaagaaacacgcaaattaatgcctgtctgtgtggaaactaaagccatagtttcaactatacagcgtaaatataagggtattaaaatacaagagggtgtggttgattatggtgctagattttacttttacaccagtaaaacaactgtagcgtcacttatcaacacacttaacgatctaaatgaaactcttgttacaatgccacttggctatgtaacacatggcttaaatttggaagaagctgctcggtatatgagatctctcaaagtgccagctacagtttctgtttcttcacctgatgctgttacagcgtataatggttatcttacttcttcttctaaaacacctgaagaacattttattgaaaccatctcacttgctggttcctataaagattggtcctattctggacaatctacacaactaggtatagaatttcttaagagaggtgataaaagtgtatattacactagtaatcctaccacattccacctagatggtgaagttatcacctttgacaatcttaagacacttctttctttgagagaagtgaggactattaaggtgtttacaacagtagacaacattaacctccacacgcaagttgtggacatgtcaatgacatatggacaacagtttggtccaacttatttggatggagctgatgttactaaaataaaacctcataattcacatgaaggtaaaacattttatgttttacctaatgatgacactctacgtgttgaggcttttgagtactaccacacaactgatcctagttttctgggtaggtacatgtcagcattaaatcacactaaaaagtggaaatacccacaagttaatggtttaacttctattaaatgggcagataacaactgttatcttgccactgcattgttaacactccaacaaatagagttgaagtttaatccacctgctctacaagatgcttattacagagcaagggctggtgaagctgctaacttttgtgcacttatcttagcctactgtaataagacagtaggtgagttaggtgatgttagagaaacaatgagttacttgtttcaacatgccaatttagattcttgcaaaagagtcttgaacgtggtgtgtaaaacttgtggacaacagcagacaacccttaagggtgtagaagctgttatgtacatgggcacactttcttatgaacaatttaagaaaggtgttcagataccttgtacgtgtggtaaacaagctacaaaatatctagtacaacaggagtcaccttttgttatgatgtcagcaccacctgctcagtatgaacttaagcatggtacatttacttgtgctagtgagtacactggtaattaccagtgtggtcactataaacatataacttctaaagaaactttgtattgcatagacggtgctttacttacaaagtcctcagaatacaaaggtcctattacggatgttttctacaaagaaaacagttacacaacaaccataaaaccagttacttataaattggatggtgttgtttgtacagaaattgaccctaagttggacaattattataagaaagacaattcttatttcacagagcaaccaattgatcttgtaccaaaccaaccatatccaaacgcaagcttcgataattttaagtttgtatgtgataatatcaaatttgctgatgatttaaaccagttaactggttataagaaacctgcttcaagagagcttaaagttacatttttccctgacttaaatggtgatgtggtggctattgattataaacactacacaccctcttttaagaaaggagctaaattgttacataaacctattgtttggcatgttaacaatgcaactaataaagccacgtataaaccaaatacctggtgtatacgttgtctttggagcacaaaaccagttgaaacatcaaattcgtttgatgtactgaagtcagaggacgcgcagggaatggataatcttgcctgcgaagatctaaaaccagtctctgaagaagtagtggaaaatcctaccatacagaaagacgttcttgagtgtaatgtgaaaactaccgaagttgtaggagacattatacttaaaccagcaaataatagtttaaaaattacagaagaggttggccacacagatctaatggctgcttatgtagacaattctagtcttactattaagaaacctaatgaattatctagagtattaggtttgaaaacccttgctactcatggtttagctgctgttaatagtgtcccttgggatactatagctaattatgctaagccttttcttaacaaagttgttagtacaactactaacatagttacacggtgtttaaaccgtgtttgtactaattatatgccttatttctttactttattgctacaattgtgtacttttactagaagtacaaattctagaattaaagcatctatgccgactactatagcaaagaatactgttaagagtgtcggtaaattttgtctagaggcttcatttaattatttgaagtcacctaatttttctaaactgataaatattataatttggtttttactattaagtgtttgcctaggttcgttaatctactcgaccgctgctttaggtgttttaatgtcgaatttaggcatgccttcgtactgtactggttacagagaaggctatttgaactcgactaatgtcactattgcaacctactgtactggttcgataccttgttcggtttgtctttcgggtttagattcgttagacacctatccttcgttagaaactatacaaattaccatttcgtcgtttaaatgggatttaactgcttttggcttagttgcagagtggtttttggcatatattcttttcactaggtttttctatgtacttggattggctgcaatcatgcaattgtttttctcgtattttgcagtacattttatttcgaattcgtggcttatgtggttaataattaatcttgtacaaatggccccgatttcggctatggttagaatgtacatcttctttgcatcgttttattatgtatggaaatcgtatgtgcatgttgtagacggttgtaattcgtcgacttgtatgatgtgttacaaacgtaatagagcaacaagagtcgaatgtacaactattgttaatggtgttagaaggtcgttttatgtctatgctaatggaggtaaaggcttttgcaaactacacaattggaattgtgttaattgtgatacattctgtgctggttcgacatttatttcggatgaagttgcgagagacttgtcgctacagtttaaaagaccaataaatcctactgaccagtcgtcgtacatcgttgattcggttacagtgaagaatggttcgatccatctttactttgataaagctggtcaaaagacttatgaaagacattcgctctcgcattttgttaacttagacaacctgagagctaataacactaaaggttcgttgcctattaatgttatagtttttgatggtaaatcgaaatgtgaagaatcgtcggcaaaatcggcgtcggtttactactcgcagcttatgtgtcaacctatactgttactagatcaggcattagtgtcggatgttggtgattcggcggaagttgcagttaaaatgtttgatgcttacgttaatacgttttcgtcgacttttaacgtaccaatggaaaaactcaaaacactagttgcaactgcagaagctgaacttgcaaagaatgtgtcgttagacaatgtcttatcgacttttatttcggcagctcggcaagggtttgttgattcggatgtagaaactaaagatgttgttgaatgtcttaaattgtcgcatcaatcggacatagaagttactggcgattcgtgtaataactatatgctcacctataacaaagttgaaaacatgacaccccgtgaccttggtgcttgtattgactgttcggcgcgtcatattaatgcgcaggtagcaaaatcgcacaacattgctttgatatggaacgttaaagatttcatgtcgttgtcggaacaactacgaaaacaaatacgttcggctgctaaaaagaataacttaccttttaagttgacatgtgcaactactagacaagttgttaatgttgtaacaacaaagatagcacttaagggtggtaaaattgttaataattggttgaagcagttaattaaa

SEQ ID NO: 47 - DNA, 7059 bp, Artificial Sequence
  Clone pCC1-4K-SARS-CoV-2-160-2. Based on SARS-CoV-2.
cgggtcccacgtgctagcgctaacataggttgtaaccatacaggtgttgttggagaaggttccgaaggtcttaatgacaaccttcttgaaatactccaaaaagagaaagtcaacatcaatattgttggtgactttaaacttaatgaagagatcgccattattttggcatctttttctgcttccacaagtgcttttgtggaaactgtgaaaggtttggattataaagcattcaaacaaattgttgaatcctgtggtaattttaaagttacaaaaggaaaagctaaaaaaggtgcctggaatattggtgaacagaaatcaatactgagtcctctttatgcatttgcatcagaggctgctcgtgttgtacgatcaattttctcccgcactcttgaaactgctcaaaattctgtgcgtgttttacagaaggccgctataacaatactagatggaatttcacagtattcactgagactcattgatgctatgatgttcacatctgatttggctactaacaatctagttgtaatggcctacattacaggtggtgttgttcagttgacttcgcagtggctaactaacatctttggcactgtttatgaaaaactcaaacccgtccttgattggcttgaagagaagtttaaggaaggtgtagagtttcttagagacggttgggaaattgttaaatttatctcaacctgtgcttgtgaaattgtcggtggacaaattgtcacctgtgcaaaggaaattaaggagagtgttcagacattctttaagcttgtaaataaatttttggctttgtgtgctgactctatcattattggtggagctaaacttaaagccttgaatttaggtgaaacatttgtcacgcactcaaagggattgtacagaaagtgtgttaaatccagagaagaaactggcctactcatgcctctaaaagccccaaaagaaattatcttcttagagggagaaacacttcccacagaagtgttaacagaggaagttgtcttgaaaactggtgatttacaaccattagaacaacctactagtgaagctgttgaagctccattggttggtacaccagtttgtattaacgggcttatgttgctcgaaatcaaagacacagaaaagtactgtgcccttgcacctaatatgatggtaacaaacaataccttcacactcaaaggcggtgcaccaacaaaggttacttttggtgatgacactgtgatagaagtgcaaggttacaagagtgtgaatatcacttttgaacttgatgaaaggattgataaagtacttaatgagaagtgctctgcctatacagttgaactcggtacagaagtaaatgagttcgcctgtgttgtggcagatgctgtcataaaaactttgcaaccagtatctgaattacttacaccactgggcattgatttagatgagtggagtatggctacatactacttatttgatgagtctggtgagtttaaattggcttcacatatgtattgttctttctaccctccagatgaggatgaagaagaaggtgattgtgaagaagaagagtttgagccatcaactcaatatgagtatggtactgaagatgattaccaaggtaaacctttggaatttggtgccacttctgctgctcttcaacctgaagaagagcaagaagaagattggttagatgatgatagtcaacaaactgttggtcaacaagacggcagtgaggacaatcagacaactactattcaaacaattgttgaggttcaacctcaattagagatggaacttacaccagttgttcagactattgaagtgaatagttttagtggttatttaaaacttactgacaatgtatacattaaaaatgcagacattgtggaagaagctaaaaaggtaaaaccaacagtggttgttaatgcagccaatgtttaccttaaacatggaggaggtgttgcaggagccttaaataaggctactaacaatgccatgcaagttgaatctgatgattacatagctactaatggaccacttaaagtgggtggtagttgtgttttaagcggacacaatcttgctaaacactgtcttcatgttgtcggcccaaatgttaacaaaggtgaagacattcaacttcttaagagtgcttatgaaaattttaatcagcacgaagttctacttgcaccattattatcagctggtatttttggtgctgaccctatacattctttaagagtttgtgtagatactgttcgcacaaatgtctacttagctgtctttgataaaaatctctatgacaaacttgtttcaagctttttggaaatgaagagtgaaaagcaagttgaacaaaagatcgctgagattcctaaagaggaagttaagccatttataactgaaagtaaaccttcagttgaacagagaaaacaagatgataagaaaatcaaagcttgtgttgaagaagttacaacaactctggaagaaactaagttcctcacagaaaacttgttactttatattgacattaatggcaatcttcatccagattctgccactcttgttagtgacattgacatcactttcttaaagaaagatgctccatatatagtgggtgatgttgttcaagagggtgttttaactgctgtggttatacctactaaaaaggctggtggcactactgaaatgctagcgaaagctttgagaaaagtgccaacagacaattatataaccacttacccgggtcagggtttaaatggttacactgtagaggaggcaaagacagtgcttaaaaagtgtaaatcggccttttacattctaccatcgattatctcgaatgagaagcaagaaattcttggaactgtttcgtggaatttgcgagaaatgcttgcacatgcagaagaaacacgcaaattaatgcctgtctgtgtggaaactaaagccatagtttcgactatacagcgtaaatataagggtattaaaatacaagagggtgtggttgattatggtgctagattttacttttacacctcgaaaacaactgtagcgtcgcttatcaacacacttaacgatctaaatgaaactcttgttacaatgccacttggctatgtaacacatggcttaaatttggaagaagctgctcggtatatgagatcgctcaaagtgccagctacagtttcggtttcgtcgcctgatgctgttacagcgtataatggttatcttacttcgtcgtcgaaaacacctgaagaacattttattgaaaccatctcgcttgctggttcgtataaagattggtcgtattcgggacaatcgacacaactaggtatagaatttcttaagagaggtgataaatcggtatattacacttcgaatcctaccacattccacctagatggtgaagttatcacctttgacaatcttaagacacttctttcgttgagagaagtgaggactattaaggtgtttacaacagtagacaacattaacctccacacgcaagttgtggacatgtcgatgacatatggacaacagtttggtccaacttatttggatggagctgatgttactaaaataaaacctcataattcgcatgaaggtaaaacattttatgttttacctaatgatgacactctacgtgttgaggcttttgagtactaccacacaactgatccttcgtttctgggtaggtacatgtcggcattaaatcacactaaaaagtggaaatacccacaagttaatggtttaacttcgattaaatgggcagataacaactgttatcttgccactgcattgttaacactccaacaaatagagttgaagtttaatccacctgctctacaagatgcttattacagagcaagggctggtgaagctgctaacttttgtgcacttatcttagcctactgtaataagacagtaggtgagttaggtgatgttagagaaacaatgtcgtacttgtttcaacatgccaatttagattcgtgcaaaagagtcttgaacgtggtgtgtaaaacttgtggacaacagcagacaacccttaagggtgtagaagctgttatgtacatgggcacactttcgtatgaacaatttaagaaaggtgttcagataccttgtacgtgtggtaaacaagctacaaaatatctagtacaacaggagtcgccttttgttatgatgtcggcaccacctgctcagtatgaacttaagcatggtacatttacttgtgcttcggagtacactggtaattaccagtgtggtcactataaacatataacttcgaaagaaactttgtattgcatagacggtgctttacttacaaagtcgtcggaatacaaaggtcctattacggatgttttctacaaagaaaactcgtacacaacaaccataaaaccagttacttataaattggatggtgttgtttgtacagaaattgaccctaagttggacaattattataagaaagacaattcgtatttcacagagcaaccaattgatcttgtaccaaaccaaccatatccaaacgcatcgttcgataattttaagtttgtatgtgataatatcaaatttgctgatgatttaaaccagttaactggttataagaaacctgcttcgagagagcttaaagttacatttttccctgacttaaatggtgatgtggtggctattgattataaacactacacaccctcgtttaagaaaggagctaaattgttacataaacctattgtttggcatgttaacaatgcaactaataaagccacgtataaaccaaatacctggtgtatacgttgtctttggtcgacaaaaccagttgaaacatcgaattcgtttgatgtactgaagtcggaggacgcgcagggaatggataatcttgcctgcgaagatctaaaaccagtctcggaagaagtagtggaaaatcctaccatacagaaagacgttcttgagtgtaatgtgaaaactaccgaagttgtaggagacattatacttaaaccagcaaataattcgttaaaaattacagaagaggttggccacacagatctaatggctgcttatgtagacaattcgtcgcttactattaagaaacctaatgaattatcgagagtattaggtttgaaaacccttgctactcatggtttagctgctgttaattcggtcccttgggatactatagctaattatgctaagccttttcttaacaaagttgtttcgacaactactaacatagttacacggtgtttaaaccgtgtttgtactaattatatgccttatttctttactttattgctacaattgtgtacttttactagatcgacaaattcgagaattaaagcatcgatgccgactactatagcaaagaatactgttaagtcggtcggtaaattttgtctagaggcttcgtttaattatttgaagtcgcctaatttttcgaaactgataaatattataatttggtttttactattatcggtttgcctaggttctttaatctactcaaccgctgctttaggtgttttaatgtctaatttaggcatgccttcttactgtactggttacagagaaggctatttgaactctactaatgtcactattgcaacctactgtactggttctataccttgtagtgtttgtcttagtggtttagattctttagacacctatccttctttagaaactatacaaattaccatttcatcttttaaatgggatttaactgcttttggcttagttgcagagtggtttttggcatatattcttttcactaggtttttctatgtacttggattggctgcaatcatgcaattgtttttcagctattttgcagtacattttattagtaattcttggcttatgtggttaataattaatcttgtacaaatggccccgatttcagctatggttagaatgtacatcttctttgcatcattttattatgtatggaaaagttatgtgcatgttgtagacggttgtaattcatcaacttgtatgatgtgttacaaacgtaatagagcaacaagagtcgaatgtacaactattgttaatggtgttagaaggtccttttatgtctatgctaatggaggtaaaggcttttgcaaactacacaattggaattgtgttaattgtgatacattctgtgctggtagtacatttattagtgatgaagttgcgagagacttgtcactacagtttaaaagaccaataaatcctactgaccagtcttcttacatcgttgatagtgttacagtgaagaatggttccatccatctttactttgataaagctggtcaaaagacttatgaaagacattctctctctcattttgttaacttagacaacctgagagctaataacactaaaggttcattgcctattaatgttatagtttttgatggtaaatcaaaatgtgaagaatcatctgcaaaatcagcgtctgtttactacagtcagcttatgtgtcaacctatactgttactagatcaggcattagtgtctgatgttggtgatagtgcggaagttgcagttaaaatgtttgatgcttacgttaatacgttttcatcaacttttaacgtaccaatggaaaaactcaaaacactagttgcaactgcagaagctgaacttgcaaagaatgtgtccttagacaatgtcttatctacttttatttcagcagctcggcaagggtttgttgattcagatgtagaaactaaagatgttgttgaatgtcttaaattgtcacatcaatctgacatagaagttactggcgatagttgtaataactatatgctcacctataacaaagttgaaaacatgacaccccgtgaccttggtgcttgtattgactgtagtgcgcgtcatattaatgcgcaggtagcaaaaagtcacaacattgctttgatatggaacgttaaagatttcatgtcattgtctgaacaactacgaaaacaaatacgtagtgctgctaaaaagaataacttaccttttaagttgacatgtgcaactactagacaagttgttaatgttgtaacaacaaagatagcacttaagggtggtaaaattgttaataattggttgaagcagttaattaaa

SEQ ID NO: 48 - DNA, 7059 bp, Artificial Sequence
  Clone pCC1-4K-SARS-CoV-2-160-3. Based on SARS-CoV-2.
cgggtcccacgtgcttcggctaacataggttgtaaccatacaggtgttgttggagaaggttcggaaggtcttaatgacaaccttcttgaaatactccaaaaagagaaagtcaacatcaatattgttggtgactttaaacttaatgaagagatcgccattattttggcatcgttttcggcttcgacatcggcttttgtggaaactgtgaaaggtttggattataaagcattcaaacaaattgttgaatcgtgtggtaattttaaagttacaaaaggaaaagctaaaaaaggtgcctggaatattggtgaacagaaatcgatactgtcgcctctttatgcatttgcatcggaggctgctcgtgttgtacgatcgattttctcgcgcactcttgaaactgctcaaaattcggtgcgtgttttacagaaggccgctataacaatactagatggaatttcgcagtattcgctgagactcattgatgctatgatgttcacatcggatttggctactaacaatctagttgtaatggcctacattacaggtggtgttgttcagttgacttcgcagtggctaactaacatctttggcactgtttatgaaaaactcaaacccgtccttgattggcttgaagagaagtttaaggaaggtgtagagtttcttagagacggttgggaaattgttaaatttatctcgacctgtgcttgtgaaattgtcggtggacaaattgtcacctgtgcaaaggaaattaaggagtcggttcagacattctttaagcttgtaaataaatttttggctttgtgtgctgactcgatcattattggtggagctaaacttaaagccttgaatttaggtgaaacatttgtcacgcactcgaagggattgtacagaaagtgtgttaaatcgagagaagaaactggcctactcatgcctctaaaagccccaaaagaaattatcttcttagagggagaaacacttcccacagaagtgttaacagaggaagttgtcttgaaaactggtgatttacaaccattagaacaacctacttcggaagctgttgaagctccattggttggtacaccagtttgtattaacgggcttatgttgctcgaaatcaaagacacagaaaagtactgtgcccttgcacctaatatgatggtaacaaacaataccttcacactcaaaggcggtgcaccaacaaaggttacttttggtgatgacactgtgatagaagtgcaaggttacaagtcggtgaatatcacttttgaacttgatgaaaggattgataaagtacttaatgagaagtgctcggcctatacagttgaactcggtacagaagtaaatgagttcgcctgtgttgtggcagatgctgtcataaaaactttgcaaccagtatcggaattacttacaccactgggcattgatttagatgagtggtcgatggctacatactacttatttgatgagtcgggtgagtttaaattggcttcgcatatgtattgttcgttctaccctccagatgaggatgaagaagaaggtgattgtgaagaagaagagtttgagccatcgactcaatatgagtatggtactgaagatgattaccaaggtaaacctttggaatttggtgccacttcggctgctcttcaacctgaagaagagcaagaagaagattggttagatgatgattcgcaacaaactgttggtcaacaagacggctcggaggacaatcagacaactactattcaaacaattgttgaggttcaacctcaattagagatggaacttacaccagttgttcagactattgaagtgaattcgttttcgggttatttaaaacttactgacaatgtatacattaaaaatgcagacattgtggaagaagctaaaaaggtaaaaccaacagtggttgttaatgcagccaatgtttaccttaaacatggaggaggtgttgcaggagccttaaataaggctactaacaatgccatgcaagttgaatcggatgattacatagctactaatggaccacttaaagtgggtggttcgtgtgttttatcgggacacaatcttgctaaacactgtcttcatgttgtcggcccaaatgttaacaaaggtgaagacattcaacttcttaagtcggcttatgaaaattttaatcagcacgaagttctacttgcaccattattatcggctggtatttttggtgctgaccctatacattcgttaagagtttgtgtagatactgttcgcacaaatgtctacttagctgtctttgataaaaatctctatgacaaacttgtttcgtcgtttttggaaatgaagtcggaaaagcaagttgaacaaaagatcgctgagattcctaaagaggaagttaagccatttataactgaatcgaaaccttcggttgaacagagaaaacaagatgataagaaaatcaaagcttgtgttgaagaagttacaacaactctggaagaaactaagttcctcacagaaaacttgttactttatattgacattaatggcaatcttcatccagattcggccactcttgtttcggacattgacatcactttcttaaagaaagatgctccatatatagtgggtgatgttgttcaagagggtgttttaactgctgtggttatacctactaaaaaggctggtggcactactgaaatgctagcgaaagctttgagaaaagtgccaacagacaattatataaccacttacccgggtcagggtttaaatggttacactgtagaggaggcaaagacagtgcttaaaaagtgtaaaagtgccttttacattctaccatctattatctctaatgagaagcaagaaattcttggaactgtttcttggaatttgcgagaaatgcttgcacatgcagaagaaacacgcaaattaatgcctgtctgtgtggaaactaaagccatagtttcaactatacagcgtaaatataagggtattaaaatacaagagggtgtggttgattatggtgctagattttacttttacaccagtaaaacaactgtagcgtcacttatcaacacacttaacgatctaaatgaaactcttgttacaatgccacttggctatgtaacacatggcttaaatttggaagaagctgctcggtatatgagatctctcaaagtgccagctacagtttctgtttcttcacctgatgctgttacagcgtataatggttatcttacttcttcttctaaaacacctgaagaacattttattgaaaccatctcacttgctggttcctataaagattggtcctattctggacaatctacacaactaggtatagaatttcttaagagaggtgataaaagtgtatattacactagtaatcctaccacattccacctagatggtgaagttatcacctttgacaatcttaagacacttctttctttgagagaagtgaggactattaaggtgtttacaacagtagacaacattaacctccacacgcaagttgtggacatgtcaatgacatatggacaacagtttggtccaacttatttggatggagctgatgttactaaaataaaacctcataattcacatgaaggtaaaacattttatgttttacctaatgatgacactctacgtgttgaggcttttgagtactaccacacaactgatcctagttttctgggtaggtacatgtcagcattaaatcacactaaaaagtggaaatacccacaagttaatggtttaacttctattaaatgggcagataacaactgttatcttgccactgcattgttaacactccaacaaatagagttgaagtttaatccacctgctctacaagatgcttattacagagcaagggctggtgaagctgctaacttttgtgcacttatcttagcctactgtaataagacagtaggtgagttaggtgatgttagagaaacaatgagttacttgtttcaacatgccaatttagattcttgcaaaagagtcttgaacgtggtgtgtaaaacttgtggacaacagcagacaacccttaagggtgtagaagctgttatgtacatgggcacactttcttatgaacaatttaagaaaggtgttcagataccttgtacgtgtggtaaacaagctacaaaatatctagtacaacaggagtcaccttttgttatgatgtcagcaccacctgctcagtatgaacttaagcatggtacatttacttgtgctagtgagtacactggtaattaccagtgtggtcactataaacatataacttctaaagaaactttgtattgcatagacggtgctttacttacaaagtcctcagaatacaaaggtcctattacggatgttttctacaaagaaaacagttacacaacaaccataaaaccagttacttataaattggatggtgttgtttgtacagaaattgaccctaagttggacaattattataagaaagacaattcttatttcacagagcaaccaattgatcttgtaccaaaccaaccatatccaaacgcaagcttcgataattttaagtttgtatgtgataatatcaaatttgctgatgatttaaaccagttaactggttataagaaacctgcttcaagagagcttaaagttacatttttccctgacttaaatggtgatgtggtggctattgattataaacactacacaccctcttttaagaaaggagctaaattgttacataaacctattgtttggcatgttaacaatgcaactaataaagccacgtataaaccaaatacctggtgtatacgttgtctttggagcacaaaaccagttgaaacatcaaattcgtttgatgtactgaagtcagaggacgcgcagggaatggataatcttgcctgcgaagatctaaaaccagtctctgaagaagtagtggaaaatcctaccatacagaaagacgttcttgagtgtaatgtgaaaactaccgaagttgtaggagacattatacttaaaccagcaaataatagtttaaaaattacagaagaggttggccacacagatctaatggctgcttatgtagacaattctagtcttactattaagaaacctaatgaattatctagagtattaggtttgaaaacccttgctactcatggtttagctgctgttaatagtgtcccttgggatactatagctaattatgctaagccttttcttaacaaagttgttagtacaactactaacatagttacacggtgtttaaaccgtgtttgtactaattatatgccttatttctttactttattgctacaattgtgtacttttactagaagtacaaattctagaattaaagcatctatgccgactactatagcaaagaatactgttaagagtgtcggtaaattttgtctagaggcttcatttaattatttgaagtcacctaatttttctaaactgataaatattataatttggtttttactattaagtgtttgcctaggttctttaatctactcaaccgctgctttaggtgttttaatgtctaatttaggcatgccttcttactgtactggttacagagaaggctatttgaactctactaatgtcactattgcaacctactgtactggttctataccttgtagtgtttgtcttagtggtttagattctttagacacctatccttctttagaaactatacaaattaccatttcatcttttaaatgggatttaactgcttttggcttagttgcagagtggtttttggcatatattcttttcactaggtttttctatgtacttggattggctgcaatcatgcaattgtttttcagctattttgcagtacattttattagtaattcttggcttatgtggttaataattaatcttgtacaaatggccccgatttcagctatggttagaatgtacatcttctttgcatcattttattatgtatggaaaagttatgtgcatgttgtagacggttgtaattcatcaacttgtatgatgtgttacaaacgtaatagagcaacaagagtcgaatgtacaactattgttaatggtgttagaaggtccttttatgtctatgctaatggaggtaaaggcttttgcaaactacacaattggaattgtgttaattgtgatacattctgtgctggtagtacatttattagtgatgaagttgcgagagacttgtcactacagtttaaaagaccaataaatcctactgaccagtcttcttacatcgttgatagtgttacagtgaagaatggttccatccatctttactttgataaagctggtcaaaagacttatgaaagacattctctctctcattttgttaacttagacaacctgagagctaataacactaaaggttcattgcctattaatgttatagtttttgatggtaaatcaaaatgtgaagaatcatctgcaaaatcagcgtctgtttactacagtcagcttatgtgtcaacctatactgttactagatcaggcattagtgtctgatgttggtgatagtgcggaagttgcagttaaaatgtttgatgcttacgttaatacgttttcatcaacttttaacgtaccaatggaaaaactcaaaacactagttgcaactgcagaagctgaacttgcaaagaatgtgtccttagacaatgtcttatctacttttatttcagcagctcggcaagggtttgttgattcagatgtagaaactaaagatgttgttgaatgtcttaaattgtcacatcaatctgacatagaagttactggcgatagttgtaataactatatgctcacctataacaaagttgaaaacatgacaccccgtgaccttggtgcttgtattgactgtagtgcgcgtcatattaatgcgcaggtagcaaaaagtcacaacattgctttgatatggaacgttaaagatttcatgtcattgtctgaacaactacgaaaacaaatacgtagtgctgctaaaaagaataacttaccttttaagttgacatgtgcaactactagacaagttgttaatgttgtaacaacaaagatagcacttaagggtggtaaaattgttaataattggttgaagcagttaattaaa

SEQ ID NO: 49 - DNA, 7059 bp, Artificial Sequence
  Clone pCC1-4K-SARS-CoV-2-160-4. Based on SARS-CoV-2.
cgggtcccacgtgcttcggctaacataggttgtaaccatacaggtgttgttggagaaggttcggaaggtcttaatgacaaccttcttgaaatactccaaaaagagaaagtcaacatcaatattgttggtgactttaaacttaatgaagagatcgccattattttggcatcgttttcggcttcgacatcggcttttgtggaaactgtgaaaggtttggattataaagcattcaaacaaattgttgaatcgtgtggtaattttaaagttacaaaaggaaaagctaaaaaaggtgcctggaatattggtgaacagaaatcgatactgtcgcctctttatgcatttgcatcggaggctgctcgtgttgtacgatcgattttctcgcgcactcttgaaactgctcaaaattcggtgcgtgttttacagaaggccgctataacaatactagatggaatttcgcagtattcgctgagactcattgatgctatgatgttcacatcggatttggctactaacaatctagttgtaatggcctacattacaggtggtgttgttcagttgacttcgcagtggctaactaacatctttggcactgtttatgaaaaactcaaacccgtccttgattggcttgaagagaagtttaaggaaggtgtagagtttcttagagacggttgggaaattgttaaatttatctcgacctgtgcttgtgaaattgtcggtggacaaattgtcacctgtgcaaaggaaattaaggagtcggttcagacattctttaagcttgtaaataaatttttggctttgtgtgctgactcgatcattattggtggagctaaacttaaagccttgaatttaggtgaaacatttgtcacgcactcgaagggattgtacagaaagtgtgttaaatcgagagaagaaactggcctactcatgcctctaaaagccccaaaagaaattatcttcttagagggagaaacacttcccacagaagtgttaacagaggaagttgtcttgaaaactggtgatttacaaccattagaacaacctacttcggaagctgttgaagctccattggttggtacaccagtttgtattaacgggcttatgttgctcgaaatcaaagacacagaaaagtactgtgcccttgcacctaatatgatggtaacaaacaataccttcacactcaaaggcggtgcaccaacaaaggttacttttggtgatgacactgtgatagaagtgcaaggttacaagtcggtgaatatcacttttgaacttgatgaaaggattgataaagtacttaatgagaagtgctcggcctatacagttgaactcggtacagaagtaaatgagttcgcctgtgttgtggcagatgctgtcataaaaactttgcaaccagtatcggaattacttacaccactgggcattgatttagatgagtggtcgatggctacatactacttatttgatgagtcgggtgagtttaaattggcttcgcatatgtattgttcgttctaccctccagatgaggatgaagaagaaggtgattgtgaagaagaagagtttgagccatcgactcaatatgagtatggtactgaagatgattaccaaggtaaacctttggaatttggtgccacttcggctgctcttcaacctgaagaagagcaagaagaagattggttagatgatgattcgcaacaaactgttggtcaacaagacggctcggaggacaatcagacaactactattcaaacaattgttgaggttcaacctcaattagagatggaacttacaccagttgttcagactattgaagtgaattcgttttcgggttatttaaaacttactgacaatgtatacattaaaaatgcagacattgtggaagaagctaaaaaggtaaaaccaacagtggttgttaatgcagccaatgtttaccttaaacatggaggaggtgttgcaggagccttaaataaggctactaacaatgccatgcaagttgaatcggatgattacatagctactaatggaccacttaaagtgggtggttcgtgtgttttatcgggacacaatcttgctaaacactgtcttcatgttgtcggcccaaatgttaacaaaggtgaagacattcaacttcttaagtcggcttatgaaaattttaatcagcacgaagttctacttgcaccattattatcggctggtatttttggtgctgaccctatacattcgttaagagtttgtgtagatactgttcgcacaaatgtctacttagctgtctttgataaaaatctctatgacaaacttgtttcgtcgtttttggaaatgaagtcggaaaagcaagttgaacaaaagatcgctgagattcctaaagaggaagttaagccatttataactgaatcgaaaccttcggttgaacagagaaaacaagatgataagaaaatcaaagcttgtgttgaagaagttacaacaactctggaagaaactaagttcctcacagaaaacttgttactttatattgacattaatggcaatcttcatccagattcggccactcttgtttcggacattgacatcactttcttaaagaaagatgctccatatatagtgggtgatgttgttcaagagggtgttttaactgctgtggttatacctactaaaaaggctggtggcactactgaaatgctagcgaaagctttgagaaaagtgccaacagacaattatataaccacttacccgggtcagggtttaaatggttacactgtagaggaggcaaagacagtgcttaaaaagtgtaaatcggccttttacattctaccatcgattatctcgaatgagaagcaagaaattcttggaactgtttcgtggaatttgcgagaaatgcttgcacatgcagaagaaacacgcaaattaatgcctgtctgtgtggaaactaaagccatagtttcgactatacagcgtaaatataagggtattaaaatacaagagggtgtggttgattatggtgctagattttacttttacacctcgaaaacaactgtagcgtcgcttatcaacacacttaacgatctaaatgaaactcttgttacaatgccacttggctatgtaacacatggcttaaatttggaagaagctgctcggtatatgagatcgctcaaagtgccagctacagtttcggtttcgtcgcctgatgctgttacagcgtataatggttatcttacttcgtcgtcgaaaacacctgaagaacattttattgaaaccatctcgcttgctggttcgtataaagattggtcgtattcgggacaatcgacacaactaggtatagaatttcttaagagaggtgataaatcggtatattacacttcgaatcctaccacattccacctagatggtgaagttatcacctttgacaatcttaagacacttctttcgttgagagaagtgaggactattaaggtgtttacaacagtagacaacattaacctccacacgcaagttgtggacatgtcgatgacatatggacaacagtttggtccaacttatttggatggagctgatgttactaaaataaaacctcataattcgcatgaaggtaaaacattttatgttttacctaatgatgacactctacgtgttgaggcttttgagtactaccacacaactgatccttcgtttctgggtaggtacatgtcggcattaaatcacactaaaaagtggaaatacccacaagttaatggtttaacttcgattaaatgggcagataacaactgttatcttgccactgcattgttaacactccaacaaatagagttgaagtttaatccacctgctctacaagatgcttattacagagcaagggctggtgaagctgctaacttttgtgcacttatcttagcctactgtaataagacagtaggtgagttaggtgatgttagagaaacaatgtcgtacttgtttcaacatgccaatttagattcgtgcaaaagagtcttgaacgtggtgtgtaaaacttgtggacaacagcagacaacccttaagggtgtagaagctgttatgtacatgggcacactttcgtatgaacaatttaagaaaggtgttcagataccttgtacgtgtggtaaacaagctacaaaatatctagtacaacaggagtcgccttttgttatgatgtcggcaccacctgctcagtatgaacttaagcatggtacatttacttgtgcttcggagtacactggtaattaccagtgtggtcactataaacatataacttcgaaagaaactttgtattgcatagacggtgctttacttacaaagtcgtcggaatacaaaggtcctattacggatgttttctacaaagaaaactcgtacacaacaaccataaaaccagttacttataaattggatggtgttgtttgtacagaaattgaccctaagttggacaattattataagaaagacaattcgtatttcacagagcaaccaattgatcttgtaccaaaccaaccatatccaaacgcatcgttcgataattttaagtttgtatgtgataatatcaaatttgctgatgatttaaaccagttaactggttataagaaacctgcttcgagagagcttaaagttacatttttccctgacttaaatggtgatgtggtggctattgattataaacactacacaccctcgtttaagaaaggagctaaattgttacataaacctattgtttggcatgttaacaatgcaactaataaagccacgtataaaccaaatacctggtgtatacgttgtctttggtcgacaaaaccagttgaaacatcgaattcgtttgatgtactgaagtcggaggacgcgcagggaatggataatcttgcctgcgaagatctaaaaccagtctcggaagaagtagtggaaaatcctaccatacagaaagacgttcttgagtgtaatgtgaaaactaccgaagttgtaggagacattatacttaaaccagcaaataattcgttaaaaattacagaagaggttggccacacagatctaatggctgcttatgtagacaattcgtcgcttactattaagaaacctaatgaattatcgagagtattaggtttgaaaacccttgctactcatggtttagctgctgttaattcggtcccttgggatactatagctaattatgctaagccttttcttaacaaagttgtttcgacaactactaacatagttacacggtgtttaaaccgtgtttgtactaattatatgccttatttctttactttattgctacaattgtgtacttttactagatcgacaaattcgagaattaaagcatcgatgccgactactatagcaaagaatactgttaagtcggtcggtaaattttgtctagaggcttcgtttaattatttgaagtcgcctaatttttcgaaactgataaatattataatttggtttttactattatcggtttgcctaggttctttaatctactcaaccgctgctttaggtgttttaatgtctaatttaggcatgccttcttactgtactggttacagagaaggctatttgaactctactaatgtcactattgcaacctactgtactggttctataccttgtagtgtttgtcttagtggtttagattctttagacacctatccttctttagaaactatacaaattaccatttcatcttttaaatgggatttaactgcttttggcttagttgcagagtggtttttggcatatattcttttcactaggtttttctatgtacttggattggctgcaatcatgcaattgtttttcagctattttgcagtacattttattagtaattcttggcttatgtggttaataattaatcttgtacaaatggccccgatttcagctatggttagaatgtacatcttctttgcatcattttattatgtatggaaaagttatgtgcatgttgtagacggttgtaattcatcaacttgtatgatgtgttacaaacgtaatagagcaacaagagtcgaatgtacaactattgttaatggtgttagaaggtccttttatgtctatgctaatggaggtaaaggcttttgcaaactacacaattggaattgtgttaattgtgatacattctgtgctggtagtacatttattagtgatgaagttgcgagagacttgtcactacagtttaaaagaccaataaatcctactgaccagtcttcttacatcgttgatagtgttacagtgaagaatggttccatccatctttactttgataaagctggtcaaaagacttatgaaagacattctctctctcattttgttaacttagacaacctgagagctaataacactaaaggttcattgcctattaatgttatagtttttgatggtaaatcaaaatgtgaagaatcatctgcaaaatcagcgtctgtttactacagtcagcttatgtgtcaacctatactgttactagatcaggcattagtgtctgatgttggtgatagtgcggaagttgcagttaaaatgtttgatgcttacgttaatacgttttcatcaacttttaacgtaccaatggaaaaactcaaaacactagttgcaactgcagaagctgaacttgcaaagaatgtgtccttagacaatgtcttatctacttttatttcagcagctcggcaagggtttgttgattcagatgtagaaactaaagatgttgttgaatgtcttaaattgtcacatcaatctgacatagaagttactggcgatagttgtaataactatatgctcacctataacaaagttgaaaacatgacaccccgtgaccttggtgcttgtattgactgtagtgcgcgtcatattaatgcgcaggtagcaaaaagtcacaacattgctttgatatggaacgttaaagatttcatgtcattgtctgaacaactacgaaaacaaatacgtagtgctgctaaaaagaataacttaccttttaagttgacatgtgcaactactagacaagttgttaatgttgtaacaacaaagatagcacttaagggtggtaaaattgttaataattggttgaagcagttaattaaa

SEQ ID NO: 50 - DNA, 7059 bp, Artificial Sequence
  Clone pCC1-4K-SARS-CoV-2-160-5. Based on SARS-CoV-2.
cgggtcccacgtgcttcggctaacataggttgtaaccatacaggtgttgttggagaaggttcggaaggtcttaatgacaaccttcttgaaatactccaaaaagagaaagtcaacatcaatattgttggtgactttaaacttaatgaagagatcgccattattttggcatcgttttcggcttcgacatcggcttttgtggaaactgtgaaaggtttggattataaagcattcaaacaaattgttgaatcgtgtggtaattttaaagttacaaaaggaaaagctaaaaaaggtgcctggaatattggtgaacagaaatcgatactgtcgcctctttatgcatttgcatcggaggctgctcgtgttgtacgatcgattttctcgcgcactcttgaaactgctcaaaattcggtgcgtgttttacagaaggccgctataacaatactagatggaatttcgcagtattcgctgagactcattgatgctatgatgttcacatcggatttggctactaacaatctagttgtaatggcctacattacaggtggtgttgttcagttgacttcgcagtggctaactaacatctttggcactgtttatgaaaaactcaaacccgtccttgattggcttgaagagaagtttaaggaaggtgtagagtttcttagagacggttgggaaattgttaaatttatctcgacctgtgcttgtgaaattgtcggtggacaaattgtcacctgtgcaaaggaaattaaggagtcggttcagacattctttaagcttgtaaataaatttttggctttgtgtgctgactcgatcattattggtggagctaaacttaaagccttgaatttaggtgaaacatttgtcacgcactcgaagggattgtacagaaagtgtgttaaatcgagagaagaaactggcctactcatgcctctaaaagccccaaaagaaattatcttcttagagggagaaacacttcccacagaagtgttaacagaggaagttgtcttgaaaactggtgatttacaaccattagaacaacctacttcggaagctgttgaagctccattggttggtacaccagtttgtattaacgggcttatgttgctcgaaatcaaagacacagaaaagtactgtgcccttgcacctaatatgatggtaacaaacaataccttcacactcaaaggcggtgcaccaacaaaggttacttttggtgatgacactgtgatagaagtgcaaggttacaagtcggtgaatatcacttttgaacttgatgaaaggattgataaagtacttaatgagaagtgctcggcctatacagttgaactcggtacagaagtaaatgagttcgcctgtgttgtggcagatgctgtcataaaaactttgcaaccagtatcggaattacttacaccactgggcattgatttagatgagtggtcgatggctacatactacttatttgatgagtcgggtgagtttaaattggcttcgcatatgtattgttcgttctaccctccagatgaggatgaagaagaaggtgattgtgaagaagaagagtttgagccatcgactcaatatgagtatggtactgaagatgattaccaaggtaaacctttggaatttggtgccacttcggctgctcttcaacctgaagaagagcaagaagaagattggttagatgatgattcgcaacaaactgttggtcaacaagacggctcggaggacaatcagacaactactattcaaacaattgttgaggttcaacctcaattagagatggaacttacaccagttgttcagactattgaagtgaattcgttttcgggttatttaaaacttactgacaatgtatacattaaaaatgcagacattgtggaagaagctaaaaaggtaaaaccaacagtggttgttaatgcagccaatgtttaccttaaacatggaggaggtgttgcaggagccttaaataaggctactaacaatgccatgcaagttgaatcggatgattacatagctactaatggaccacttaaagtgggtggttcgtgtgttttatcgggacacaatcttgctaaacactgtcttcatgttgtcggcccaaatgttaacaaaggtgaagacattcaacttcttaagtcggcttatgaaaattttaatcagcacgaagttctacttgcaccattattatcggctggtatttttggtgctgaccctatacattcgttaagagtttgtgtagatactgttcgcacaaatgtctacttagctgtctttgataaaaatctctatgacaaacttgtttcgtcgtttttggaaatgaagtcggaaaagcaagttgaacaaaagatcgctgagattcctaaagaggaagttaagccatttataactgaatcgaaaccttcggttgaacagagaaaacaagatgataagaaaatcaaagcttgtgttgaagaagttacaacaactctggaagaaactaagttcctcacagaaaacttgttactttatattgacattaatggcaatcttcatccagattcggccactcttgtttcggacattgacatcactttcttaaagaaagatgctccatatatagtgggtgatgttgttcaagagggtgttttaactgctgtggttatacctactaaaaaggctggtggcactactgaaatgctagcgaaagctttgagaaaagtgccaacagacaattatataaccacttacccgggtcagggtttaaatggttacactgtagaggaggcaaagacagtgcttaaaaagtgtaaaagtgccttttacattctaccatctattatctctaatgagaagcaagaaattcttggaactgtttcttggaatttgcgagaaatgcttgcacatgcagaagaaacacgcaaattaatgcctgtctgtgtggaaactaaagccatagtttcaactatacagcgtaaatataagggtattaaaatacaagagggtgtggttgattatggtgctagattttacttttacaccagtaaaacaactgtagcgtcacttatcaacacacttaacgatctaaatgaaactcttgttacaatgccacttggctatgtaacacatggcttaaatttggaagaagctgctcggtatatgagatctctcaaagtgccagctacagtttctgtttcttcacctgatgctgttacagcgtataatggttatcttacttcttcttctaaaacacctgaagaacattttattgaaaccatctcacttgctggttcctataaagattggtcctattctggacaatctacacaactaggtatagaatttcttaagagaggtgataaaagtgtatattacactagtaatcctaccacattccacctagatggtgaagttatcacctttgacaatcttaagacacttctttctttgagagaagtgaggactattaaggtgtttacaacagtagacaacattaacctccacacgcaagttgtggacatgtcaatgacatatggacaacagtttggtccaacttatttggatggagctgatgttactaaaataaaacctcataattcacatgaaggtaaaacattttatgttttacctaatgatgacactctacgtgttgaggcttttgagtactaccacacaactgatcctagttttctgggtaggtacatgtcagcattaaatcacactaaaaagtggaaatacccacaagttaatggtttaacttctattaaatgggcagataacaactgttatcttgccactgcattgttaacactccaacaaatagagttgaagtttaatccacctgctctacaagatgcttattacagagcaagggctggtgaagctgctaacttttgtgcacttatcttagcctactgtaataagacagtaggtgagttaggtgatgttagagaaacaatgagttacttgtttcaacatgccaatttagattcttgcaaaagagtcttgaacgtggtgtgtaaaacttgtggacaacagcagacaacccttaagggtgtagaagctgttatgtacatgggcacactttcttatgaacaatttaagaaaggtgttcagataccttgtacgtgtggtaaacaagctacaaaatatctagtacaacaggagtcaccttttgttatgatgtcagcaccacctgctcagtatgaacttaagcatggtacatttacttgtgctagtgagtacactggtaattaccagtgtggtcactataaacatataacttctaaagaaactttgtattgcatagacggtgctttacttacaaagtcctcagaatacaaaggtcctattacggatgttttctacaaagaaaacagttacacaacaaccataaaaccagttacttataaattggatggtgttgtttgtacagaaattgaccctaagttggacaattattataagaaagacaattcttatttcacagagcaaccaattgatcttgtaccaaaccaaccatatccaaacgcaagcttcgataattttaagtttgtatgtgataatatcaaatttgctgatgatttaaaccagttaactggttataagaaacctgcttcaagagagcttaaagttacatttttccctgacttaaatggtgatgtggtggctattgattataaacactacacaccctcttttaagaaaggagctaaattgttacataaacctattgtttggcatgttaacaatgcaactaataaagccacgtataaaccaaatacctggtgtatacgttgtctttggagcacaaaaccagttgaaacatcaaattcgtttgatgtactgaagtcagaggacgcgcagggaatggataatcttgcctgcgaagatctaaaaccagtctctgaagaagtagtggaaaatcctaccatacagaaagacgttcttgagtgtaatgtgaaaactaccgaagttgtaggagacattatacttaaaccagcaaataatagtttaaaaattacagaagaggttggccacacagatctaatggctgcttatgtagacaattctagtcttactattaagaaacctaatgaattatctagagtattaggtttgaaaacccttgctactcatggtttagctgctgttaatagtgtcccttgggatactatagctaattatgctaagccttttcttaacaaagttgttagtacaactactaacatagttacacggtgtttaaaccgtgtttgtactaattatatgccttatttctttactttattgctacaattgtgtacttttactagaagtacaaattctagaattaaagcatctatgccgactactatagcaaagaatactgttaagagtgtcggtaaattttgtctagaggcttcatttaattatttgaagtcacctaatttttctaaactgataaatattataatttggtttttactattaagtgtttgcctaggttcgttaatctactcgaccgctgctttaggtgttttaatgtcgaatttaggcatgccttcgtactgtactggttacagagaaggctatttgaactcgactaatgtcactattgcaacctactgtactggttcgataccttgttcggtttgtctttcgggtttagattcgttagacacctatccttcgttagaaactatacaaattaccatttcgtcgtttaaatgggatttaactgcttttggcttagttgcagagtggtttttggcatatattcttttcactaggtttttctatgtacttggattggctgcaatcatgcaattgtttttctcgtattttgcagtacattttatttcgaattcgtggcttatgtggttaataattaatcttgtacaaatggccccgatttcggctatggttagaatgtacatcttctttgcatcgttttattatgtatggaaatcgtatgtgcatgttgtagacggttgtaattcgtcgacttgtatgatgtgttacaaacgtaatagagcaacaagagtcgaatgtacaactattgttaatggtgttagaaggtcgttttatgtctatgctaatggaggtaaaggcttttgcaaactacacaattggaattgtgttaattgtgatacattctgtgctggttcgacatttatttcggatgaagttgcgagagacttgtcgctacagtttaaaagaccaataaatcctactgaccagtcgtcgtacatcgttgattcggttacagtgaagaatggttcgatccatctttactttgataaagctggtcaaaagacttatgaaagacattcgctctcgcattttgttaacttagacaacctgagagctaataacactaaaggttcgttgcctattaatgttatagtttttgatggtaaatcgaaatgtgaagaatcgtcggcaaaatcggcgtcggtttactactcgcagcttatgtgtcaacctatactgttactagatcaggcattagtgtcggatgttggtgattcggcggaagttgcagttaaaatgtttgatgcttacgttaatacgttttcgtcgacttttaacgtaccaatggaaaaactcaaaacactagttgcaactgcagaagctgaacttgcaaagaatgtgtcgttagacaatgtcttatcgacttttatttcggcagctcggcaagggtttgttgattcggatgtagaaactaaagatgttgttgaatgtcttaaattgtcgcatcaatcggacatagaagttactggcgattcgtgtaataactatatgctcacctataacaaagttgaaaacatgacaccccgtgaccttggtgcttgtattgactgttcggcgcgtcatattaatgcgcaggtagcaaaatcgcacaacattgctttgatatggaacgttaaagatttcatgtcgttgtcggaacaactacgaaaacaaatacgttcggctgctaaaaagaataacttaccttttaagttgacatgtgcaactactagacaagttgttaatgttgtaacaacaaagatagcacttaagggtggtaaaattgttaataattggttgaagcagttaattaaa

SEQ ID NO: 51 - DNA, 7059 bp, Artificial Sequence
  Clone pCC1-4K-SARS-CoV-2-160-6. Based on SARS-CoV-2.
cgggtcccacgtgctagcgctaacataggttgtaaccatacaggtgttgttggagaaggttccgaaggtcttaatgacaaccttcttgaaatactccaaaaagagaaagtcaacatcaatattgttggtgactttaaacttaatgaagagatcgccattattttggcatctttttctgcttccacaagtgcttttgtggaaactgtgaaaggtttggattataaagcattcaaacaaattgttgaatcctgtggtaattttaaagttacaaaaggaaaagctaaaaaaggtgcctggaatattggtgaacagaaatcaatactgagtcctctttatgcatttgcatcagaggctgctcgtgttgtacgatcaattttctcccgcactcttgaaactgctcaaaattctgtgcgtgttttacagaaggccgctataacaatactagatggaatttcacagtattcactgagactcattgatgctatgatgttcacatctgatttggctactaacaatctagttgtaatggcctacattacaggtggtgttgttcagttgacttcgcagtggctaactaacatctttggcactgtttatgaaaaactcaaacccgtccttgattggcttgaagagaagtttaaggaaggtgtagagtttcttagagacggttgggaaattgttaaatttatctcaacctgtgcttgtgaaattgtcggtggacaaattgtcacctgtgcaaaggaaattaaggagagtgttcagacattctttaagcttgtaaataaatttttggctttgtgtgctgactctatcattattggtggagctaaacttaaagccttgaatttaggtgaaacatttgtcacgcactcaaagggattgtacagaaagtgtgttaaatccagagaagaaactggcctactcatgcctctaaaagccccaaaagaaattatcttcttagagggagaaacacttcccacagaagtgttaacagaggaagttgtcttgaaaactggtgatttacaaccattagaacaacctactagtgaagctgttgaagctccattggttggtacaccagtttgtattaacgggcttatgttgctcgaaatcaaagacacagaaaagtactgtgcccttgcacctaatatgatggtaacaaacaataccttcacactcaaaggcggtgcaccaacaaaggttacttttggtgatgacactgtgatagaagtgcaaggttacaagagtgtgaatatcacttttgaacttgatgaaaggattgataaagtacttaatgagaagtgctctgcctatacagttgaactcggtacagaagtaaatgagttcgcctgtgttgtggcagatgctgtcataaaaactttgcaaccagtatctgaattacttacaccactgggcattgatttagatgagtggagtatggctacatactacttatttgatgagtctggtgagtttaaattggcttcacatatgtattgttctttctaccctccagatgaggatgaagaagaaggtgattgtgaagaagaagagtttgagccatcaactcaatatgagtatggtactgaagatgattaccaaggtaaacctttggaatttggtgccacttctgctgctcttcaacctgaagaagagcaagaagaagattggttagatgatgatagtcaacaaactgttggtcaacaagacggcagtgaggacaatcagacaactactattcaaacaattgttgaggttcaacctcaattagagatggaacttacaccagttgttcagactattgaagtgaatagttttagtggttatttaaaacttactgacaatgtatacattaaaaatgcagacattgtggaagaagctaaaaaggtaaaaccaacagtggttgttaatgcagccaatgtttaccttaaacatggaggaggtgttgcaggagccttaaataaggctactaacaatgccatgcaagttgaatctgatgattacatagctactaatggaccacttaaagtgggtggtagttgtgttttaagcggacacaatcttgctaaacactgtcttcatgttgtcggcccaaatgttaacaaaggtgaagacattcaacttcttaagagtgcttatgaaaattttaatcagcacgaagttctacttgcaccattattatcagctggtatttttggtgctgaccctatacattctttaagagtttgtgtagatactgttcgcacaaatgtctacttagctgtctttgataaaaatctctatgacaaacttgtttcaagctttttggaaatgaagagtgaaaagcaagttgaacaaaagatcgctgagattcctaaagaggaagttaagccatttataactgaaagtaaaccttcagttgaacagagaaaacaagatgataagaaaatcaaagcttgtgttgaagaagttacaacaactctggaagaaactaagttcctcacagaaaacttgttactttatattgacattaatggcaatcttcatccagattctgccactcttgttagtgacattgacatcactttcttaaagaaagatgctccatatatagtgggtgatgttgttcaagagggtgttttaactgctgtggttatacctactaaaaaggctggtggcactactgaaatgctagcgaaagctttgagaaaagtgccaacagacaattatataaccacttacccgggtcagggtttaaatggttacactgtagaggaggcaaagacagtgcttaaaaagtgtaaatcggccttttacattctaccatcgattatctcgaatgagaagcaagaaattcttggaactgtttcgtggaatttgcgagaaatgcttgcacatgcagaagaaacacgcaaattaatgcctgtctgtgtggaaactaaagccatagtttcgactatacagcgtaaatataagggtattaaaatacaagagggtgtggttgattatggtgctagattttacttttacacctcgaaaacaactgtagcgtcgcttatcaacacacttaacgatctaaatgaaactcttgttacaatgccacttggctatgtaacacatggcttaaatttggaagaagctgctcggtatatgagatcgctcaaagtgccagctacagtttcggtttcgtcgcctgatgctgttacagcgtataatggttatcttacttcgtcgtcgaaaacacctgaagaacattttattgaaaccatctcgcttgctggttcgtataaagattggtcgtattcgggacaatcgacacaactaggtatagaatttcttaagagaggtgataaatcggtatattacacttcgaatcctaccacattccacctagatggtgaagttatcacctttgacaatcttaagacacttctttcgttgagagaagtgaggactattaaggtgtttacaacagtagacaacattaacctccacacgcaagttgtggacatgtcgatgacatatggacaacagtttggtccaacttatttggatggagctgatgttactaaaataaaacctcataattcgcatgaaggtaaaacattttatgttttacctaatgatgacactctacgtgttgaggcttttgagtactaccacacaactgatccttcgtttctgggtaggtacatgtcggcattaaatcacactaaaaagtggaaatacccacaagttaatggtttaacttcgattaaatgggcagataacaactgttatcttgccactgcattgttaacactccaacaaatagagttgaagtttaatccacctgctctacaagatgcttattacagagcaagggctggtgaagctgctaacttttgtgcacttatcttagcctactgtaataagacagtaggtgagttaggtgatgttagagaaacaatgtcgtacttgtttcaacatgccaatttagattcgtgcaaaagagtcttgaacgtggtgtgtaaaacttgtggacaacagcagacaacccttaagggtgtagaagctgttatgtacatgggcacactttcgtatgaacaatttaagaaaggtgttcagataccttgtacgtgtggtaaacaagctacaaaatatctagtacaacaggagtcgccttttgttatgatgtcggcaccacctgctcagtatgaacttaagcatggtacatttacttgtgcttcggagtacactggtaattaccagtgtggtcactataaacatataacttcgaaagaaactttgtattgcatagacggtgctttacttacaaagtcgtcggaatacaaaggtcctattacggatgttttctacaaagaaaactcgtacacaacaaccataaaaccagttacttataaattggatggtgttgtttgtacagaaattgaccctaagttggacaattattataagaaagacaattcgtatttcacagagcaaccaattgatcttgtaccaaaccaaccatatccaaacgcatcgttcgataattttaagtttgtatgtgataatatcaaatttgctgatgatttaaaccagttaactggttataagaaacctgcttcgagagagcttaaagttacatttttccctgacttaaatggtgatgtggtggctattgattataaacactacacaccctcgtttaagaaaggagctaaattgttacataaacctattgtttggcatgttaacaatgcaactaataaagccacgtataaaccaaatacctggtgtatacgttgtctttggtcgacaaaaccagttgaaacatcgaattcgtttgatgtactgaagtcggaggacgcgcagggaatggataatcttgcctgcgaagatctaaaaccagtctcggaagaagtagtggaaaatcctaccatacagaaagacgttcttgagtgtaatgtgaaaactaccgaagttgtaggagacattatacttaaaccagcaaataattcgttaaaaattacagaagaggttggccacacagatctaatggctgcttatgtagacaattcgtcgcttactattaagaaacctaatgaattatcgagagtattaggtttgaaaacccttgctactcatggtttagctgctgttaattcggtcccttgggatactatagctaattatgctaagccttttcttaacaaagttgtttcgacaactactaacatagttacacggtgtttaaaccgtgtttgtactaattatatgccttatttctttactttattgctacaattgtgtacttttactagatcgacaaattcgagaattaaagcatcgatgccgactactatagcaaagaatactgttaagtcggtcggtaaattttgtctagaggcttcgtttaattatttgaagtcgcctaatttttcgaaactgataaatattataatttggtttttactattatcggtttgcctaggttcgttaatctactcgaccgctgctttaggtgttttaatgtcgaatttaggcatgccttcgtactgtactggttacagagaaggctatttgaactcgactaatgtcactattgcaacctactgtactggttcgataccttgttcggtttgtctttcgggtttagattcgttagacacctatccttcgttagaaactatacaaattaccatttcgtcgtttaaatgggatttaactgcttttggcttagttgcagagtggtttttggcatatattcttttcactaggtttttctatgtacttggattggctgcaatcatgcaattgtttttctcgtattttgcagtacattttatttcgaattcgtggcttatgtggttaataattaatcttgtacaaatggccccgatttcggctatggttagaatgtacatcttctttgcatcgttttattatgtatggaaatcgtatgtgcatgttgtagacggttgtaattcgtcgacttgtatgatgtgttacaaacgtaatagagcaacaagagtcgaatgtacaactattgttaatggtgttagaaggtcgttttatgtctatgctaatggaggtaaaggcttttgcaaactacacaattggaattgtgttaattgtgatacattctgtgctggttcgacatttatttcggatgaagttgcgagagacttgtcgctacagtttaaaagaccaataaatcctactgaccagtcgtcgtacatcgttgattcggttacagtgaagaatggttcgatccatctttactttgataaagctggtcaaaagacttatgaaagacattcgctctcgcattttgttaacttagacaacctgagagctaataacactaaaggttcgttgcctattaatgttatagtttttgatggtaaatcgaaatgtgaagaatcgtcggcaaaatcggcgtcggtttactactcgcagcttatgtgtcaacctatactgttactagatcaggcattagtgtcggatgttggtgattcggcggaagttgcagttaaaatgtttgatgcttacgttaatacgttttcgtcgacttttaacgtaccaatggaaaaactcaaaacactagttgcaactgcagaagctgaacttgcaaagaatgtgtcgttagacaatgtcttatcgacttttatttcggcagctcggcaagggtttgttgattcggatgtagaaactaaagatgttgttgaatgtcttaaattgtcgcatcaatcggacatagaagttactggcgattcgtgtaataactatatgctcacctataacaaagttgaaaacatgacaccccgtgaccttggtgcttgtattgactgttcggcgcgtcatattaatgcgcaggtagcaaaatcgcacaacattgctttgatatggaacgttaaagatttcatgtcgttgtcggaacaactacgaaaacaaatacgttcggctgctaaaaagaataacttaccttttaagttgacatgtgcaactactagacaagttgttaatgttgtaacaacaaagatagcacttaagggtggtaaaattgttaataattggttgaagcagttaattaaa

SEQ ID NO: 52 - DNA, 7059 bp, Artificial Sequence
  Clone pCC1-4K-SARS-CoV-2-160-7. Based on SARS-CoV-2.
cgggtcccacgtgcttcggctaacataggttgtaaccatacaggtgttgttggagaaggttcggaaggtcttaatgacaaccttcttgaaatactccaaaaagagaaagtcaacatcaatattgttggtgactttaaacttaatgaagagatcgccattattttggcatcgttttcggcttcgacatcggcttttgtggaaactgtgaaaggtttggattataaagcattcaaacaaattgttgaatcgtgtggtaattttaaagttacaaaaggaaaagctaaaaaaggtgcctggaatattggtgaacagaaatcgatactgtcgcctctttatgcatttgcatcggaggctgctcgtgttgtacgatcgattttctcgcgcactcttgaaactgctcaaaattcggtgcgtgttttacagaaggccgctataacaatactagatggaatttcgcagtattcgctgagactcattgatgctatgatgttcacatcggatttggctactaacaatctagttgtaatggcctacattacaggtggtgttgttcagttgacttcgcagtggctaactaacatctttggcactgtttatgaaaaactcaaacccgtccttgattggcttgaagagaagtttaaggaaggtgtagagtttcttagagacggttgggaaattgttaaatttatctcgacctgtgcttgtgaaattgtcggtggacaaattgtcacctgtgcaaaggaaattaaggagtcggttcagacattctttaagcttgtaaataaatttttggctttgtgtgctgactcgatcattattggtggagctaaacttaaagccttgaatttaggtgaaacatttgtcacgcactcgaagggattgtacagaaagtgtgttaaatcgagagaagaaactggcctactcatgcctctaaaagccccaaaagaaattatcttcttagagggagaaacacttcccacagaagtgttaacagaggaagttgtcttgaaaactggtgatttacaaccattagaacaacctacttcggaagctgttgaagctccattggttggtacaccagtttgtattaacgggcttatgttgctcgaaatcaaagacacagaaaagtactgtgcccttgcacctaatatgatggtaacaaacaataccttcacactcaaaggcggtgcaccaacaaaggttacttttggtgatgacactgtgatagaagtgcaaggttacaagtcggtgaatatcacttttgaacttgatgaaaggattgataaagtacttaatgagaagtgctcggcctatacagttgaactcggtacagaagtaaatgagttcgcctgtgttgtggcagatgctgtcataaaaactttgcaaccagtatcggaattacttacaccactgggcattgatttagatgagtggtcgatggctacatactacttatttgatgagtcgggtgagtttaaattggcttcgcatatgtattgttcgttctaccctccagatgaggatgaagaagaaggtgattgtgaagaagaagagtttgagccatcgactcaatatgagtatggtactgaagatgattaccaaggtaaacctttggaatttggtgccacttcggctgctcttcaacctgaagaagagcaagaagaagattggttagatgatgattcgcaacaaactgttggtcaacaagacggctcggaggacaatcagacaactactattcaaacaattgttgaggttcaacctcaattagagatggaacttacaccagttgttcagactattgaagtgaattcgttttcgggttatttaaaacttactgacaatgtatacattaaaaatgcagacattgtggaagaagctaaaaaggtaaaaccaacagtggttgttaatgcagccaatgtttaccttaaacatggaggaggtgttgcaggagccttaaataaggctactaacaatgccatgcaagttgaatcggatgattacatagctactaatggaccacttaaagtgggtggttcgtgtgttttatcgggacacaatcttgctaaacactgtcttcatgttgtcggcccaaatgttaacaaaggtgaagacattcaacttcttaagtcggcttatgaaaattttaatcagcacgaagttctacttgcaccattattatcggctggtatttttggtgctgaccctatacattcgttaagagtttgtgtagatactgttcgcacaaatgtctacttagctgtctttgataaaaatctctatgacaaacttgtttcgtcgtttttggaaatgaagtcggaaaagcaagttgaacaaaagatcgctgagattcctaaagaggaagttaagccatttataactgaatcgaaaccttcggttgaacagagaaaacaagatgataagaaaatcaaagcttgtgttgaagaagttacaacaactctggaagaaactaagttcctcacagaaaacttgttactttatattgacattaatggcaatcttcatccagattcggccactcttgtttcggacattgacatcactttcttaaagaaagatgctccatatatagtgggtgatgttgttcaagagggtgttttaactgctgtggttatacctactaaaaaggctggtggcactactgaaatgctagcgaaagctttgagaaaagtgccaacagacaattatataaccacttacccgggtcagggtttaaatggttacactgtagaggaggcaaagacagtgcttaaaaagtgtaaatcggccttttacattctaccatcgattatctcgaatgagaagcaagaaattcttggaactgtttcgtggaatttgcgagaaatgcttgcacatgcagaagaaacacgcaaattaatgcctgtctgtgtggaaactaaagccatagtttcgactatacagcgtaaatataagggtattaaaatacaagagggtgtggttgattatggtgctagattttacttttacacctcgaaaacaactgtagcgtcgcttatcaacacacttaacgatctaaatgaaactcttgttacaatgccacttggctatgtaacacatggcttaaatttggaagaagctgctcggtatatgagatcgctcaaagtgccagctacagtttcggtttcgtcgcctgatgctgttacagcgtataatggttatcttacttcgtcgtcgaaaacacctgaagaacattttattgaaaccatctcgcttgctggttcgtataaagattggtcgtattcgggacaatcgacacaactaggtatagaatttcttaagagaggtgataaatcggtatattacacttcgaatcctaccacattccacctagatggtgaagttatcacctttgacaatcttaagacacttctttcgttgagagaagtgaggactattaaggtgtttacaacagtagacaacattaacctccacacgcaagttgtggacatgtcgatgacatatggacaacagtttggtccaacttatttggatggagctgatgttactaaaataaaacctcataattcgcatgaaggtaaaacattttatgttttacctaatgatgacactctacgtgttgaggcttttgagtactaccacacaactgatccttcgtttctgggtaggtacatgtcggcattaaatcacactaaaaagtggaaatacccacaagttaatggtttaacttcgattaaatgggcagataacaactgttatcttgccactgcattgttaacactccaacaaatagagttgaagtttaatccacctgctctacaagatgcttattacagagcaagggctggtgaagctgctaacttttgtgcacttatcttagcctactgtaataagacagtaggtgagttaggtgatgttagagaaacaatgtcgtacttgtttcaacatgccaatttagattcgtgcaaaagagtcttgaacgtggtgtgtaaaacttgtggacaacagcagacaacccttaagggtgtagaagctgttatgtacatgggcacactttcgtatgaacaatttaagaaaggtgttcagataccttgtacgtgtggtaaacaagctacaaaatatctagtacaacaggagtcgccttttgttatgatgtcggcaccacctgctcagtatgaacttaagcatggtacatttacttgtgcttcggagtacactggtaattaccagtgtggtcactataaacatataacttcgaaagaaactttgtattgcatagacggtgctttacttacaaagtcgtcggaatacaaaggtcctattacggatgttttctacaaagaaaactcgtacacaacaaccataaaaccagttacttataaattggatggtgttgtttgtacagaaattgaccctaagttggacaattattataagaaagacaattcgtatttcacagagcaaccaattgatcttgtaccaaaccaaccatatccaaacgcatcgttcgataattttaagtttgtatgtgataatatcaaatttgctgatgatttaaaccagttaactggttataagaaacctgcttcgagagagcttaaagttacatttttccctgacttaaatggtgatgtggtggctattgattataaacactacacaccctcgtttaagaaaggagctaaattgttacataaacctattgtttggcatgttaacaatgcaactaataaagccacgtataaaccaaatacctggtgtatacgttgtctttggtcgacaaaaccagttgaaacatcgaattcgtttgatgtactgaagtcggaggacgcgcagggaatggataatcttgcctgcgaagatctaaaaccagtctcggaagaagtagtggaaaatcctaccatacagaaagacgttcttgagtgtaatgtgaaaactaccgaagttgtaggagacattatacttaaaccagcaaataattcgttaaaaattacagaagaggttggccacacagatctaatggctgcttatgtagacaattcgtcgcttactattaagaaacctaatgaattatcgagagtattaggtttgaaaacccttgctactcatggtttagctgctgttaattcggtcccttgggatactatagctaattatgctaagccttttcttaacaaagttgtttcgacaactactaacatagttacacggtgtttaaaccgtgtttgtactaattatatgccttatttctttactttattgctacaattgtgtacttttactagatcgacaaattcgagaattaaagcatcgatgccgactactatagcaaagaatactgttaagtcggtcggtaaattttgtctagaggcttcgtttaattatttgaagtcgcctaatttttcgaaactgataaatattataatttggtttttactattatcggtttgcctaggttcgttaatctactcgaccgctgctttaggtgttttaatgtcgaatttaggcatgccttcgtactgtactggttacagagaaggctatttgaactcgactaatgtcactattgcaacctactgtactggttcgataccttgttcggtttgtctttcgggtttagattcgttagacacctatccttcgttagaaactatacaaattaccatttcgtcgtttaaatgggatttaactgcttttggcttagttgcagagtggtttttggcatatattcttttcactaggtttttctatgtacttggattggctgcaatcatgcaattgtttttctcgtattttgcagtacattttatttcgaattcgtggcttatgtggttaataattaatcttgtacaaatggccccgatttcggctatggttagaatgtacatcttctttgcatcgttttattatgtatggaaatcgtatgtgcatgttgtagacggttgtaattcgtcgacttgtatgatgtgttacaaacgtaatagagcaacaagagtcgaatgtacaactattgttaatggtgttagaaggtcgttttatgtctatgctaatggaggtaaaggcttttgcaaactacacaattggaattgtgttaattgtgatacattctgtgctggttcgacatttatttcggatgaagttgcgagagacttgtcgctacagtttaaaagaccaataaatcctactgaccagtcgtcgtacatcgttgattcggttacagtgaagaatggttcgatccatctttactttgataaagctggtcaaaagacttatgaaagacattcgctctcgcattttgttaacttagacaacctgagagctaataacactaaaggttcgttgcctattaatgttatagtttttgatggtaaatcgaaatgtgaagaatcgtcggcaaaatcggcgtcggtttactactcgcagcttatgtgtcaacctatactgttactagatcaggcattagtgtcggatgttggtgattcggcggaagttgcagttaaaatgtttgatgcttacgttaatacgttttcgtcgacttttaacgtaccaatggaaaaactcaaaacactagttgcaactgcagaagctgaacttgcaaagaatgtgtcgttagacaatgtcttatcgacttttatttcggcagctcggcaagggtttgttgattcggatgtagaaactaaagatgttgttgaatgtcttaaattgtcgcatcaatcggacatagaagttactggcgattcgtgtaataactatatgctcacctataacaaagttgaaaacatgacaccccgtgaccttggtgcttgtattgactgttcggcgcgtcatattaatgcgcaggtagcaaaatcgcacaacattgctttgatatggaacgttaaagatttcatgtcgttgtcggaacaactacgaaaacaaatacgttcggctgctaaaaagaataacttaccttttaagttgacatgtgcaactactagacaagttgttaatgttgtaacaacaaagatagcacttaagggtggtaaaattgttaataattggttgaagcagttaattaaa

SEQ ID NO: 53 - DNA, 7059 bp, Artificial Sequence
  Clone pCC1-4K-SARS-CoV-2-4N-1. Based on SARS-CoV-2.
cgggtcccacgtgctagcgctaacataggttgtaaccatacaggtgttgttggagaaggttccgaaggtcttaatgacaaccttcttgaaatactccaaaaagagaaagtcaacatcaatattgttggtgactttaaacttaatgaagagatcgccattattttggcatctttttctgcttccacaagtgcttttgtggaaactgtgaaaggtttggattataaagcattcaaacaaattgttgaatcctgtggtaattttaaagttacaaaaggaaaagctaaaaaaggtgcctggaatattggtgaacagaaatcaatactgagtcctctttatgcatttgcatcagaggctgctcgtgttgtacgatcaattttctcccgcactcttgaaactgctcaaaattctgtgcgtgttttacagaaggccgctataacaatactagatggaatttcacagtattcactgagactcattgatgctatgatgttcacatctgatttggctactaacaatctagttgtaatggcctacattacaggtggtgttgttcagttgacttcgcagtggctaactaacatctttggcactgtttatgaaaaactcaaacccgtccttgattggcttgaagagaagtttaaggaaggtgtagagtttcttagagacggttgggaaattgttaaatttatctcaacctgtgcttgtgaaattgtcggtggacaaattgtcacctgtgcaaaggaaattaaggagagtgttcagacattctttaagcttgtaaataaatttttggctttgtgtgctgactctatcattattggtggagctaaacttaaagccttgaatttaggtgaaacatttgtcacgcactcaaagggattgtacagaaagtgtgttaaatccagagaagaaactggcctactcatgcctctaaaagccccaaaagaaattatcttcttagagggagaaacacttcccacagaagtgttaacagaggaagttgtcttgaaaactggtgatttacaaccattagaacaacctactagtgaagctgttgaagctccattggttggtacaccagtttgtattaacgggcttatgttgctcgaaatcaaagacacagaaaagtactgtgcccttgcacctaatatgatggtaacaaacaataccttcacactcaaaggcggtgcaccaacaaaggttacttttggtgatgacactgtgatagaagtgcaaggttacaagagtgtgaatatcacttttgaacttgatgaaaggattgataaagtacttaatgagaagtgctctgcctatacagttgaactcggtacagaagtaaatgagttcgcctgtgttgtggcagatgctgtcataaaaactttgcaaccagtatctgaattacttacaccactgggcattgatttagatgagtggagtatggctacatactacttatttgatgagtctggtgagtttaaattggcttcacatatgtattgttctttctaccctccagatgaggatgaagaagaaggtgattgtgaagaagaagagtttgagccatcaactcaatatgagtatggtactgaagatgattaccaaggtaaacctttggaatttggtgccacttctgctgctcttcaacctgaagaagagcaagaagaagattggttagatgatgatagtcaacaaactgttggtcaacaagacggcagtgaggacaatcagacaactactattcaaacaattgttgaggttcaacctcaattagagatggaacttacaccagttgttcagactattgaagtgaatagttttagtggttatttaaaacttactgacaatgtatacattaaaaatgcagacattgtggaagaagctaaaaaggtaaaaccaacagtggttgttaatgcagccaatgtttaccttaaacatggaggaggtgttgcaggagccttaaataaggctactaacaatgccatgcaagttgaatctgatgattacatagctactaatggaccacttaaagtgggtggtagttgtgttttaagcggacacaatcttgctaaacactgtcttcatgttgtcggcccaaatgttaacaaaggtgaagacattcaacttcttaagagtgcttatgaaaattttaatcagcacgaagttctacttgcaccattattatcagctggtatttttggtgctgaccctatacattctttaagagtttgtgtagatactgttcgcacaaatgtctacttagctgtctttgataaaaatctctatgacaaacttgtttcaagctttttggaaatgaagagtgaaaagcaagttgaacaaaagatcgctgagattcctaaagaggaagttaagccatttataactgaaagtaaaccttcagttgaacagagaaaacaagatgataagaaaatcaaagcttgtgttgaagaagttacaacaactctggaagaaactaagttcctcacagaaaacttgttactttatattgacattaatggcaatcttcatccagattctgccactcttgttagtgacattgacatcactttcttaaagaaagatgctccatatatagtgggtgatgttgttcaagagggtgttttaactgctgtggttatacctactaaaaaggctggtggcactactgaaatgctagcgaaagctttgagaaaagtgccaacagacaattatataaccacttacccgggtcagggtttaaatggttacactgtagaggaggcaaagacagtgcttaaaaagtgtaaaagtgccttttacattctaccatctattatctctaatgagaagcaagaaattcttggaactgtttcttggaatttgcgagaaatgcttgcacatgcagaagaaacacgcaaattaatgcctgtctgtgtggaaactaaagccatagtttcaactatacagcgtaaatataagggtattaaaatacaagagggtgtggttgattatggtgctagattttacttttacaccagtaaaacaactgtagcgtcacttatcaacacacttaacgatctaaatgaaactcttgttacaatgccacttggctatgtaacacatggcttaaatttggaagaagctgctcggtatatgagatctctcaaagtgccagctacagtttctgtttcttcacctgatgctgttacagcgtataatggttatcttacttcttcttctaaaacacctgaagaacattttattgaaaccatctcacttgctggttcctataaagattggtcctattctggacaatctacacaactaggtatagaatttcttaagagaggtgataaaagtgtatattacactagtaatcctaccacattccacctagatggtgaagttatcacctttgacaatcttaagacacttctttctttgagagaagtgaggactattaaggtgtttacaacagtagacaacattaacctccacacgcaagttgtggacatgtcaatgacatatggacaacagtttggtccaacttatttggatggagctgatgttactaaaataaaacctcataattcacatgaaggtaaaacattttatgttttacctaatgatgacactctacgtgttgaggcttttgagtactaccacacaactgatcctagttttctgggtaggtacatgtcagcattaaatcacactaaaaagtggaaatacccacaagttaatggtttaacttctattaaatgggcagataacaactgttatcttgccactgcattgttaacactccaacaaatagagttgaagtttaatccacctgctctacaagatgcttattacagagcaagggctggtgaagctgctaacttttgtgcacttatcttagcctactgtaataagacagtaggtgagttaggtgatgttagagaaacaatgagttacttgtttcaacatgccaatttagattcttgcaaaagagtcttgaacgtggtgtgtaaaacttgtggacaacagcagacaacccttaagggtgtagaagctgttatgtacatgggcacactttcttatgaacaatttaagaaaggtgttcagataccttgtacgtgtggtaaacaagctacaaaatatctagtacaacaggagtcaccttttgttatgatgtcagcaccacctgctcagtatgaacttaagcatggtacatttacttgtgctagtgagtacactggtaattaccagtgtggtcactataaacatataacttctaaagaaactttgtattgcatagacggtgctttacttacaaagtcctcagaatacaaaggtcctattacggatgttttctacaaagaaaacagttacacaacaaccataaaaccagttacttataaattggatggtgttgtttgtacagaaattgaccctaagttggacaattattataagaaagacaattcttatttcacagagcaaccaattgatcttgtaccaaaccaaccatatccaaacgcaagcttcgataattttaagtttgtatgtgataatatcaaatttgctgatgatttaaaccagttaactggttataagaaacctgcttcaagagagcttaaagttacatttttccctgacttaaatggtgatgtggtggctattgattataaacactacacaccctcttttaagaaaggagctaaattgttacataaacctattgtttggcatgttaacaatgcaactaataaagccacgtataaaccaaatacctggtgtatacgttgtctttggagcacaaaaccagttgaaacatcaaattcgtttgatgtactgaagtcagaggacgcgcagggaatggataatcttgcctgcgaagatctaaaaccagtctctgaagaagtagtggaaaatcctaccatacagaaagacgttcttgagtgtaatgtgaaaactaccgaagttgtaggagacattatacttaaaccagcaaataatagtttaaaaattacagaagaggttggccacacagatctaatggctgcttatgtagacaattctagtcttactattaagaaacctaatgaattatctagagtattaggtttgaaaacccttgctactcatggtttagctgctgttaatagtgtcccttgggatactatagctaattatgctaagccttttcttaacaaagttgttagtacaactactaacatagttacacggtgtttaaaccgtgtttgtactaattatatgccttatttctttactttattgctacaattgtgtacttttactagaagtacaaattctagaattaaagcatctatgccgactactatagcaaagaatactgttaagagtgtcggtaaattttgtctagaggcttcatttaattatttgaagtcacctaatttttctaaactgataaatattataatttggtttttactattaagtgtttgcctaggttctttaatatactcaacggcggcgttaggtgttttaatgtctaatttaggcatgccgtcttactgtacgggttacagagaaggctatttgaactctacgaatgtcacgatagcgacgtactgtacgggttctataccgtgtagtgtttgtcttagtggtttagattctttagacacgtatccgtctttagaaacgatacaaataacgatatcatcttttaaatgggatttaacggcgtttggcttagttgcggagtggtttttggcgtatattcttttcacgaggtttttctatgtacttggattggcggcgataatgcaattgtttttcagctattttgcggtacattttataagtaattcttggcttatgtggttaataataaatcttgtacaaatggcgccgatatcagcgatggttagaatgtacatattctttgcgtcattttattatgtatggaaaagttatgtgcatgttgtagacggttgtaattcatcaacgtgtatgatgtgttacaaacgtaatagagcgacgagagtcgaatgtacgacgatagttaatggtgttagaaggtccttttatgtctatgcgaatggaggtaaaggcttttgcaaactacacaattggaattgtgttaattgtgatacgttctgtgcgggtagtacgtttataagtgatgaagttgcgagagacttgtcactacagtttaaaagaccgataaatccgacggaccagtcttcttacatagttgatagtgttacggtgaagaatggttccatacatctttactttgataaagcgggtcaaaagacgtatgaaagacattctctctctcattttgttaacttagacaacctgagagcgaataacacgaaaggttcattgccgataaatgttatagtttttgatggtaaatcaaaatgtgaagaatcatctgcgaaatcagcgtctgtttactacagtcagcttatgtgtcaaccgatactgttactagatcaggcgttagtgtctgatgttggtgatagtgcggaagttgcggttaaaatgtttgatgcgtacgttaatacgttttcatcaacgtttaacgtaccgatggaaaaactcaaaacgctagttgcgacggcggaagcggaacttgcgaagaatgtgtccttagacaatgtcttatctacgtttatatcagcggcgcggcaagggtttgttgattcagatgtagaaacgaaagatgttgttgaatgtcttaaattgtcacatcaatctgacatagaagttacgggcgatagttgtaataactatatgctcacgtataacaaagttgaaaacatgacgccgcgtgaccttggtgcgtgtatagactgtagtgcgcgtcatataaatgcgcaggtagcgaaaagtcacaacatagcgttgatatggaacgttaaagatttcatgtcattgtctgaacaactacgaaaacaaatacgtagtgcggcgaaaaagaataacttaccgtttaagttgacgtgtgcgacgacgagacaagttgttaatgttgtaacgacgaagatagcgcttaagggtggtaaaatagttaataattggttgaagcagttaattaaa

SEQ ID NO: 54 - DNA, 7059 bp, Artificial Sequence
  Clone pCC1-4K-SARS-CoV-2-4N-2. Based on SARS-CoV-2.
cgggtcccacgtgctagcgctaacataggttgtaaccatacaggtgttgttggagaaggttccgaaggtcttaatgacaaccttcttgaaatactccaaaaagagaaagtcaacatcaatattgttggtgactttaaacttaatgaagagatcgccattattttggcatctttttctgcttccacaagtgcttttgtggaaactgtgaaaggtttggattataaagcattcaaacaaattgttgaatcctgtggtaattttaaagttacaaaaggaaaagctaaaaaaggtgcctggaatattggtgaacagaaatcaatactgagtcctctttatgcatttgcatcagaggctgctcgtgttgtacgatcaattttctcccgcactcttgaaactgctcaaaattctgtgcgtgttttacagaaggccgctataacaatactagatggaatttcacagtattcactgagactcattgatgctatgatgttcacatctgatttggctactaacaatctagttgtaatggcctacattacaggtggtgttgttcagttgacttcgcagtggctaactaacatctttggcactgtttatgaaaaactcaaacccgtccttgattggcttgaagagaagtttaaggaaggtgtagagtttcttagagacggttgggaaattgttaaatttatctcaacctgtgcttgtgaaattgtcggtggacaaattgtcacctgtgcaaaggaaattaaggagagtgttcagacattctttaagcttgtaaataaatttttggctttgtgtgctgactctatcattattggtggagctaaacttaaagccttgaatttaggtgaaacatttgtcacgcactcaaagggattgtacagaaagtgtgttaaatccagagaagaaactggcctactcatgcctctaaaagccccaaaagaaattatcttcttagagggagaaacacttcccacagaagtgttaacagaggaagttgtcttgaaaactggtgatttacaaccattagaacaacctactagtgaagctgttgaagctccattggttggtacaccagtttgtattaacgggcttatgttgctcgaaatcaaagacacagaaaagtactgtgcccttgcacctaatatgatggtaacaaacaataccttcacactcaaaggcggtgcaccaacaaaggttacttttggtgatgacactgtgatagaagtgcaaggttacaagagtgtgaatatcacttttgaacttgatgaaaggattgataaagtacttaatgagaagtgctctgcctatacagttgaactcggtacagaagtaaatgagttcgcctgtgttgtggcagatgctgtcataaaaactttgcaaccagtatctgaattacttacaccactgggcattgatttagatgagtggagtatggctacatactacttatttgatgagtctggtgagtttaaattggcttcacatatgtattgttctttctaccctccagatgaggatgaagaagaaggtgattgtgaagaagaagagtttgagccatcaactcaatatgagtatggtactgaagatgattaccaaggtaaacctttggaatttggtgccacttctgctgctcttcaacctgaagaagagcaagaagaagattggttagatgatgatagtcaacaaactgttggtcaacaagacggcagtgaggacaatcagacaactactattcaaacaattgttgaggttcaacctcaattagagatggaacttacaccagttgttcagactattgaagtgaatagttttagtggttatttaaaacttactgacaatgtatacattaaaaatgcagacattgtggaagaagctaaaaaggtaaaaccaacagtggttgttaatgcagccaatgtttaccttaaacatggaggaggtgttgcaggagccttaaataaggctactaacaatgccatgcaagttgaatctgatgattacatagctactaatggaccacttaaagtgggtggtagttgtgttttaagcggacacaatcttgctaaacactgtcttcatgttgtcggcccaaatgttaacaaaggtgaagacattcaacttcttaagagtgcttatgaaaattttaatcagcacgaagttctacttgcaccattattatcagctggtatttttggtgctgaccctatacattctttaagagtttgtgtagatactgttcgcacaaatgtctacttagctgtctttgataaaaatctctatgacaaacttgtttcaagctttttggaaatgaagagtgaaaagcaagttgaacaaaagatcgctgagattcctaaagaggaagttaagccatttataactgaaagtaaaccttcagttgaacagagaaaacaagatgataagaaaatcaaagcttgtgttgaagaagttacaacaactctggaagaaactaagttcctcacagaaaacttgttactttatattgacattaatggcaatcttcatccagattctgccactcttgttagtgacattgacatcactttcttaaagaaagatgctccatatatagtgggtgatgttgttcaagagggtgttttaactgctgtggttatacctactaaaaaggctggtggcactactgaaatgctagcgaaagctttgagaaaagtgccaacagacaattatataaccacttacccgggtcagggtttaaatggttacacggtagaggaggcgaagacggtgcttaaaaagtgtaaaagtgcgttttacatactaccgtctataatatctaatgagaagcaagaaatacttggaacggtttcttggaatttgcgagaaatgcttgcgcatgcggaagaaacgcgcaaattaatgccggtctgtgtggaaacgaaagcgatagtttcaacgatacagcgtaaatataagggtataaaaatacaagagggtgtggttgattatggtgcgagattttacttttacacgagtaaaacgacggtagcgtcacttataaacacgcttaacgatctaaatgaaacgcttgttacgatgccgcttggctatgtaacgcatggcttaaatttggaagaagcggcgcggtatatgagatctctcaaagtgccggcgacggtttctgtttcttcaccggatgcggttacggcgtataatggttatcttacgtcttcttctaaaacgccggaagaacattttattgaaacgatatcacttgcgggttcctataaagattggtcctattctggacaatctacgcaactaggtatagaatttcttaagagaggtgataaaagtgtatattacacgagtaatccgacgacgttccacctagatggtgaagttataacgtttgacaatcttaagacgcttctttctttgagagaagtgaggacgataaaggtgtttacgacggtagacaacataaacctccacacgcaagttgtggacatgtcaatgacgtatggacaacagtttggtccgacgtatttggatggagcggatgttacgaaaataaaaccgcataattcacatgaaggtaaaacgttttatgttttaccgaatgatgacacgctacgtgttgaggcgtttgagtactaccacacgacggatccgagttttctgggtaggtacatgtcagcgttaaatcacacgaaaaagtggaaatacccgcaagttaatggtttaacgtctataaaatgggcggataacaactgttatcttgcgacggcgttgttaacgctccaacaaatagagttgaagtttaatccgccggcgctacaagatgcgtattacagagcgagggcgggtgaagcggcgaacttttgtgcgcttatattagcgtactgtaataagacggtaggtgagttaggtgatgttagagaaacgatgagttacttgtttcaacatgcgaatttagattcttgcaaaagagtcttgaacgtggtgtgtaaaacgtgtggacaacagcagacgacgcttaagggtgtagaagcggttatgtacatgggcacgctttcttatgaacaatttaagaaaggtgttcagataccgtgtacgtgtggtaaacaagcgacgaaatatctagtacaacaggagtcaccgtttgttatgatgtcagcgccgccggcgcagtatgaacttaagcatggtacgtttacgtgtgcgagtgagtacacgggtaattaccagtgtggtcactataaacatataacgtctaaagaaacgttgtattgcatagacggtgcgttacttacgaagtcctcagaatacaaaggtccgataacggatgttttctacaaagaaaacagttacacgacgacgataaaaccggttacgtataaattggatggtgttgtttgtacggaaatagacccgaagttggacaattattataagaaagacaattcttatttcacggagcaaccgatagatcttgtaccgaaccaaccgtatccgaacgcgagcttcgataattttaagtttgtatgtgataatataaaatttgcggatgatttaaaccagttaacgggttataagaaaccggcgtcaagagagcttaaagttacgtttttcccggacttaaatggtgatgtggtggcgatagattataaacactacacgccgtcttttaagaaaggagcgaaattgttacataaaccgatagtttggcatgttaacaatgcgacgaataaagcgacgtataaaccgaatacgtggtgtatacgttgtctttggagcacgaaaccggttgaaacgtcaaattcgtttgatgtactgaagtcagaggacgcgcagggaatggataatcttgcgtgcgaagatctaaaaccggtctctgaagaagtagtggaaaatccgacgatacagaaagacgttcttgagtgtaatgtgaaaacgacggaagttgtaggagacataatacttaaaccggcgaataatagtttaaaaataacggaagaggttggccacacggatctaatggcggcgtatgtagacaattctagtcttacgataaagaaaccgaatgaattatctagagtattaggtttgaaaacgcttgcgacgcatggtttagcggcggttaatagtgtcccgtgggatacgatagcgaattatgcgaagccgtttcttaacaaagttgttagtacgacgacgaacatagttacgcggtgtttaaaccgtgtttgtacgaattatatgccgtatttctttacgttattgctacaattgtgtacgtttacgagaagtacgaattctagaataaaagcgtctatgccgacgacgatagcgaagaatacggttaagagtgtcggtaaattttgtctagaggcgtcatttaattatttgaagtcaccgaatttttctaaactgataaatataataatatggtttttactattaagtgtttgcctaggttctttaatctactcaaccgctgctttaggtgttttaatgtctaatttaggcatgccttcttactgtactggttacagagaaggctatttgaactctactaatgtcactattgcaacctactgtactggttctataccttgtagtgtttgtcttagtggtttagattctttagacacctatccttctttagaaactatacaaattaccatttcatcttttaaatgggatttaactgcttttggcttagttgcagagtggtttttggcatatattcttttcactaggtttttctatgtacttggattggctgcaatcatgcaattgtttttcagctattttgcagtacattttattagtaattcttggcttatgtggttaataattaatcttgtacaaatggccccgatttcagctatggttagaatgtacatcttctttgcatcattttattatgtatggaaaagttatgtgcatgttgtagacggttgtaattcatcaacttgtatgatgtgttacaaacgtaatagagcaacaagagtcgaatgtacaactattgttaatggtgttagaaggtccttttatgtctatgctaatggaggtaaaggcttttgcaaactacacaattggaattgtgttaattgtgatacattctgtgctggtagtacatttattagtgatgaagttgcgagagacttgtcactacagtttaaaagaccaataaatcctactgaccagtcttcttacatcgttgatagtgttacagtgaagaatggttccatccatctttactttgataaagctggtcaaaagacttatgaaagacattctctctctcattttgttaacttagacaacctgagagctaataacactaaaggttcattgcctattaatgttatagtttttgatggtaaatcaaaatgtgaagaatcatctgcaaaatcagcgtctgtttactacagtcagcttatgtgtcaacctatactgttactagatcaggcattagtgtctgatgttggtgatagtgcggaagttgcagttaaaatgtttgatgcttacgttaatacgttttcatcaacttttaacgtaccaatggaaaaactcaaaacactagttgcaactgcagaagctgaacttgcaaagaatgtgtccttagacaatgtcttatctacttttatttcagcagctcggcaagggtttgttgattcagatgtagaaactaaagatgttgttgaatgtcttaaattgtcacatcaatctgacatagaagttactggcgatagttgtaataactatatgctcacctataacaaagttgaaaacatgacaccccgtgaccttggtgcttgtattgactgtagtgcgcgtcatattaatgcgcaggtagcaaaaagtcacaacattgctttgatatggaacgttaaagatttcatgtcattgtctgaacaactacgaaaacaaatacgtagtgctgctaaaaagaataacttaccttttaagttgacatgtgcaactactagacaagttgttaatgttgtaacaacaaagatagcacttaagggtggtaaaattgttaataattggttgaagcagttaattaaa

SEQ ID NO: 55 - DNA, 7059 bp, Artificial Sequence
  Clone pCC1-4K-SARS-CoV-2-4N-3. Based on SARS-CoV-2.
cgggtcccacgtgcgagcgcgaacataggttgtaaccatacgggtgttgttggagaaggttccgaaggtcttaatgacaaccttcttgaaatactccaaaaagagaaagtcaacataaatatagttggtgactttaaacttaatgaagagatagcgataatattggcgtctttttctgcgtccacgagtgcgtttgtggaaacggtgaaaggtttggattataaagcgttcaaacaaattgttgaatcctgtggtaattttaaagttacgaaaggaaaagcgaaaaaaggtgcgtggaatataggtgaacagaaatcaatactgagtccgctttatgcgtttgcgtcagaggcggcgcgtgttgtacgatcaatattctcccgcacgcttgaaacggcgcaaaattctgtgcgtgttttacagaaggcggcgataacgatactagatggaatatcacagtattcactgagactcatagatgcgatgatgttcacgtctgatttggcgacgaacaatctagttgtaatggcgtacataacgggtggtgttgttcagttgacgtcgcagtggctaacgaacatatttggcacggtttatgaaaaactcaaaccggtccttgattggcttgaagagaagtttaaggaaggtgtagagtttcttagagacggttgggaaatagttaaatttatatcaacgtgtgcgtgtgaaatagtcggtggacaaatagtcacgtgtgcgaaggaaataaaggagagtgttcagacgttctttaagcttgtaaataaatttttggcgttgtgtgcggactctataataataggtggagcgaaacttaaagcgttgaatttaggtgaaacgtttgtcacgcactcaaagggattgtacagaaagtgtgttaaatccagagaagaaacgggcctactcatgccgctaaaagcgccgaaagaaataatattcttagagggagaaacgcttccgacggaagtgttaacggaggaagttgtcttgaaaacgggtgatttacaaccgttagaacaaccgacgagtgaagcggttgaagcgccgttggttggtacgccggtttgtataaacgggcttatgttgctcgaaataaaagacacggaaaagtactgtgcgcttgcgccgaatatgatggtaacgaacaatacgttcacgctcaaaggcggtgcgccgacaaaggttacgtttggtgatgacacggtgatagaagtgcaaggttacaagagtgtgaatataacgtttgaacttgatgaaaggatagataaagtacttaatgagaagtgctctgcgtatacggttgaactcggtacggaagtaaatgagttcgcgtgtgttgtggcggatgcggtcataaaaacgttgcaaccggtatctgaattacttacgccgctgggcatagatttagatgagtggagtatggcgacgtactacttatttgatgagtctggtgagtttaaattggcgtcacatatgtattgttctttctacccgccggatgaggatgaagaagaaggtgattgtgaagaagaagagtttgagccgtcaacgcaatatgagtatggtacggaagatgattaccaaggtaaaccgttggaatttggtgcgacgtctgcggcgcttcaaccggaagaagagcaagaagaagattggttagatgatgatagtcaacaaacggttggtcaacaagacggcagtgaggacaatcagacgacgacgattcaaacgatagttgaggttcaaccgcaattagagatggaacttacgccggttgttcagacgatagaagtgaatagttttagtggttatttaaaacttacggacaatgtatacataaaaaatgcggacatagtggaagaagcgaaaaaggtaaaaccgacggtggttgttaatgcggcgaatgtttaccttaaacatggaggaggtgttgcgggagcgttaaataaggcgacgaacaatgcgatgcaagttgaatctgatgattacatagcgacgaatggaccgcttaaagtgggtggtagttgtgttttaagcggacacaatcttgcgaaacactgtcttcatgttgtcggcccgaatgttaacaaaggtgaagacatacaacttcttaagagtgcgtatgaaaattttaatcagcacgaagttctacttgcgccgttattatcagcgggtatatttggtgcggacccgatacattctttaagagtttgtgtagatacggttcgcacgaatgtctacttagcggtctttgataaaaatctctatgacaaacttgtttcaagctttttggaaatgaagagtgaaaagcaagttgaacaaaagatagcggagataccgaaagaggaagttaagccgtttataacggaaagtaaaccgtcagttgaacagagaaaacaagatgataagaaaataaaagcgtgtgttgaagaagttacgacgacgctggaagaaacgaagttcctcacggaaaacttgttactttatatagacataaatggcaatcttcatccggattctgcgacgcttgttagtgacatagacataacgttcttaaagaaagatgcgccgtatatagtgggtgatgttgttcaagagggtgttttaacggcggtggttataccgacgaaaaaggcgggtggcacgacggaaatgctagcgaaagcgttgagaaaagtgccgacggacaattatataacgacgtacccgggtcagggtttaaatggttacactgtagaggaggcaaagacagtgcttaaaaagtgtaaaagtgccttttacattctaccatctattatctctaatgagaagcaagaaattcttggaactgtttcttggaatttgcgagaaatgcttgcacatgcagaagaaacacgcaaattaatgcctgtctgtgtggaaactaaagccatagtttcaactatacagcgtaaatataagggtattaaaatacaagagggtgtggttgattatggtgctagattttacttttacaccagtaaaacaactgtagcgtcacttatcaacacacttaacgatctaaatgaaactcttgttacaatgccacttggctatgtaacacatggcttaaatttggaagaagctgctcggtatatgagatctctcaaagtgccagctacagtttctgtttcttcacctgatgctgttacagcgtataatggttatcttacttcttcttctaaaacacctgaagaacattttattgaaaccatctcacttgctggttcctataaagattggtcctattctggacaatctacacaactaggtatagaatttcttaagagaggtgataaaagtgtatattacactagtaatcctaccacattccacctagatggtgaagttatcacctttgacaatcttaagacacttctttctttgagagaagtgaggactattaaggtgtttacaacagtagacaacattaacctccacacgcaagttgtggacatgtcaatgacatatggacaacagtttggtccaacttatttggatggagctgatgttactaaaataaaacctcataattcacatgaaggtaaaacattttatgttttacctaatgatgacactctacgtgttgaggcttttgagtactaccacacaactgatcctagttttctgggtaggtacatgtcagcattaaatcacactaaaaagtggaaatacccacaagttaatggtttaacttctattaaatgggcagataacaactgttatcttgccactgcattgttaacactccaacaaatagagttgaagtttaatccacctgctctacaagatgcttattacagagcaagggctggtgaagctgctaacttttgtgcacttatcttagcctactgtaataagacagtaggtgagttaggtgatgttagagaaacaatgagttacttgtttcaacatgccaatttagattcttgcaaaagagtcttgaacgtggtgtgtaaaacttgtggacaacagcagacaacccttaagggtgtagaagctgttatgtacatgggcacactttcttatgaacaatttaagaaaggtgttcagataccttgtacgtgtggtaaacaagctacaaaatatctagtacaacaggagtcaccttttgttatgatgtcagcaccacctgctcagtatgaacttaagcatggtacatttacttgtgctagtgagtacactggtaattaccagtgtggtcactataaacatataacttctaaagaaactttgtattgcatagacggtgctttacttacaaagtcctcagaatacaaaggtcctattacggatgttttctacaaagaaaacagttacacaacaaccataaaaccagttacttataaattggatggtgttgtttgtacagaaattgaccctaagttggacaattattataagaaagacaattcttatttcacagagcaaccaattgatcttgtaccaaaccaaccatatccaaacgcaagcttcgataattttaagtttgtatgtgataatatcaaatttgctgatgatttaaaccagttaactggttataagaaacctgcttcaagagagcttaaagttacatttttccctgacttaaatggtgatgtggtggctattgattataaacactacacaccctcttttaagaaaggagctaaattgttacataaacctattgtttggcatgttaacaatgcaactaataaagccacgtataaaccaaatacctggtgtatacgttgtctttggagcacaaaaccagttgaaacatcaaattcgtttgatgtactgaagtcagaggacgcgcagggaatggataatcttgcctgcgaagatctaaaaccagtctctgaagaagtagtggaaaatcctaccatacagaaagacgttcttgagtgtaatgtgaaaactaccgaagttgtaggagacattatacttaaaccagcaaataatagtttaaaaattacagaagaggttggccacacagatctaatggctgcttatgtagacaattctagtcttactattaagaaacctaatgaattatctagagtattaggtttgaaaacccttgctactcatggtttagctgctgttaatagtgtcccttgggatactatagctaattatgctaagccttttcttaacaaagttgttagtacaactactaacatagttacacggtgtttaaaccgtgtttgtactaattatatgccttatttctttactttattgctacaattgtgtacttttactagaagtacaaattctagaattaaagcatctatgccgactactatagcaaagaatactgttaagagtgtcggtaaattttgtctagaggcttcatttaattatttgaagtcacctaatttttctaaactgataaatattataatttggtttttactattaagtgtttgcctaggttctttaatctactcaaccgctgctttaggtgttttaatgtctaatttaggcatgccttcttactgtactggttacagagaaggctatttgaactctactaatgtcactattgcaacctactgtactggttctataccttgtagtgtttgtcttagtggtttagattctttagacacctatccttctttagaaactatacaaattaccatttcatcttttaaatgggatttaactgcttttggcttagttgcagagtggtttttggcatatattcttttcactaggtttttctatgtacttggattggctgcaatcatgcaattgtttttcagctattttgcagtacattttattagtaattcttggcttatgtggttaataattaatcttgtacaaatggccccgatttcagctatggttagaatgtacatcttctttgcatcattttattatgtatggaaaagttatgtgcatgttgtagacggttgtaattcatcaacttgtatgatgtgttacaaacgtaatagagcaacaagagtcgaatgtacaactattgttaatggtgttagaaggtccttttatgtctatgctaatggaggtaaaggcttttgcaaactacacaattggaattgtgttaattgtgatacattctgtgctggtagtacatttattagtgatgaagttgcgagagacttgtcactacagtttaaaagaccaataaatcctactgaccagtcttcttacatcgttgatagtgttacagtgaagaatggttccatccatctttactttgataaagctggtcaaaagacttatgaaagacattctctctctcattttgttaacttagacaacctgagagctaataacactaaaggttcattgcctattaatgttatagtttttgatggtaaatcaaaatgtgaagaatcatctgcaaaatcagcgtctgtttactacagtcagcttatgtgtcaacctatactgttactagatcaggcattagtgtctgatgttggtgatagtgcggaagttgcagttaaaatgtttgatgcttacgttaatacgttttcatcaacttttaacgtaccaatggaaaaactcaaaacactagttgcaactgcagaagctgaacttgcaaagaatgtgtccttagacaatgtcttatctacttttatttcagcagctcggcaagggtttgttgattcagatgtagaaactaaagatgttgttgaatgtcttaaattgtcacatcaatctgacatagaagttactggcgatagttgtaataactatatgctcacctataacaaagttgaaaacatgacaccccgtgaccttggtgcttgtattgactgtagtgcgcgtcatattaatgcgcaggtagcaaaaagtcacaacattgctttgatatggaacgttaaagatttcatgtcattgtctgaacaactacgaaaacaaatacgtagtgctgctaaaaagaataacttaccttttaagttgacatgtgcaactactagacaagttgttaatgttgtaacaacaaagatagcacttaagggtggtaaaattgttaataattggttgaagcagttaattaaa

SEQ ID NO: 56 - DNA, 7059 bp, Artificial Sequence
  Clone pCC1-4K-SARS-CoV-2-4N-4. Based on SARS-CoV-2.
cgggtcccacgtgcgagcgcgaacataggttgtaaccatacgggtgttgttggagaaggttccgaaggtcttaatgacaaccttcttgaaatactccaaaaagagaaagtcaacataaatatagttggtgactttaaacttaatgaagagatagcgataatattggcgtctttttctgcgtccacgagtgcgtttgtggaaacggtgaaaggtttggattataaagcgttcaaacaaattgttgaatcctgtggtaattttaaagttacgaaaggaaaagcgaaaaaaggtgcgtggaatataggtgaacagaaatcaatactgagtccgctttatgcgtttgcgtcagaggcggcgcgtgttgtacgatcaatattctcccgcacgcttgaaacggcgcaaaattctgtgcgtgttttacagaaggcggcgataacgatactagatggaatatcacagtattcactgagactcatagatgcgatgatgttcacgtctgatttggcgacgaacaatctagttgtaatggcgtacataacgggtggtgttgttcagttgacgtcgcagtggctaacgaacatatttggcacggtttatgaaaaactcaaaccggtccttgattggcttgaagagaagtttaaggaaggtgtagagtttcttagagacggttgggaaatagttaaatttatatcaacgtgtgcgtgtgaaatagtcggtggacaaatagtcacgtgtgcgaaggaaataaaggagagtgttcagacgttctttaagcttgtaaataaatttttggcgttgtgtgcggactctataataataggtggagcgaaacttaaagcgttgaatttaggtgaaacgtttgtcacgcactcaaagggattgtacagaaagtgtgttaaatccagagaagaaacgggcctactcatgccgctaaaagcgccgaaagaaataatattcttagagggagaaacgcttccgacggaagtgttaacggaggaagttgtcttgaaaacgggtgatttacaaccgttagaacaaccgacgagtgaagcggttgaagcgccgttggttggtacgccggtttgtataaacgggcttatgttgctcgaaataaaagacacggaaaagtactgtgcgcttgcgccgaatatgatggtaacgaacaatacgttcacgctcaaaggcggtgcgccgacaaaggttacgtttggtgatgacacggtgatagaagtgcaaggttacaagagtgtgaatataacgtttgaacttgatgaaaggatagataaagtacttaatgagaagtgctctgcgtatacggttgaactcggtacggaagtaaatgagttcgcgtgtgttgtggcggatgcggtcataaaaacgttgcaaccggtatctgaattacttacgccgctgggcatagatttagatgagtggagtatggcgacgtactacttatttgatgagtctggtgagtttaaattggcgtcacatatgtattgttctttctacccgccggatgaggatgaagaagaaggtgattgtgaagaagaagagtttgagccgtcaacgcaatatgagtatggtacggaagatgattaccaaggtaaaccgttggaatttggtgcgacgtctgcggcgcttcaaccggaagaagagcaagaagaagattggttagatgatgatagtcaacaaacggttggtcaacaagacggcagtgaggacaatcagacgacgacgattcaaacgatagttgaggttcaaccgcaattagagatggaacttacgccggttgttcagacgatagaagtgaatagttttagtggttatttaaaacttacggacaatgtatacataaaaaatgcggacatagtggaagaagcgaaaaaggtaaaaccgacggtggttgttaatgcggcgaatgtttaccttaaacatggaggaggtgttgcgggagcgttaaataaggcgacgaacaatgcgatgcaagttgaatctgatgattacatagcgacgaatggaccgcttaaagtgggtggtagttgtgttttaagcggacacaatcttgcgaaacactgtcttcatgttgtcggcccgaatgttaacaaaggtgaagacatacaacttcttaagagtgcgtatgaaaattttaatcagcacgaagttctacttgcgccgttattatcagcgggtatatttggtgcggacccgatacattctttaagagtttgtgtagatacggttcgcacgaatgtctacttagcggtctttgataaaaatctctatgacaaacttgtttcaagctttttggaaatgaagagtgaaaagcaagttgaacaaaagatagcggagataccgaaagaggaagttaagccgtttataacggaaagtaaaccgtcagttgaacagagaaaacaagatgataagaaaataaaagcgtgtgttgaagaagttacgacgacgctggaagaaacgaagttcctcacggaaaacttgttactttatatagacataaatggcaatcttcatccggattctgcgacgcttgttagtgacatagacataacgttcttaaagaaagatgcgccgtatatagtgggtgatgttgttcaagagggtgttttaacggcggtggttataccgacgaaaaaggcgggtggcacgacggaaatgctagcgaaagcgttgagaaaagtgccgacggacaattatataacgacgtacccgggtcagggtttaaatggttacacggtagaggaggcgaagacggtgcttaaaaagtgtaaaagtgcgttttacatactaccgtctataatatctaatgagaagcaagaaatacttggaacggtttcttggaatttgcgagaaatgcttgcgcatgcggaagaaacgcgcaaattaatgccggtctgtgtggaaacgaaagcgatagtttcaacgatacagcgtaaatataagggtataaaaatacaagagggtgtggttgattatggtgcgagattttacttttacacgagtaaaacgacggtagcgtcacttataaacacgcttaacgatctaaatgaaacgcttgttacgatgccgcttggctatgtaacgcatggcttaaatttggaagaagcggcgcggtatatgagatctctcaaagtgccggcgacggtttctgtttcttcaccggatgcggttacggcgtataatggttatcttacgtcttcttctaaaacgccggaagaacattttattgaaacgatatcacttgcgggttcctataaagattggtcctattctggacaatctacgcaactaggtatagaatttcttaagagaggtgataaaagtgtatattacacgagtaatccgacgacgttccacctagatggtgaagttataacgtttgacaatcttaagacgcttctttctttgagagaagtgaggacgataaaggtgtttacgacggtagacaacataaacctccacacgcaagttgtggacatgtcaatgacgtatggacaacagtttggtccgacgtatttggatggagcggatgttacgaaaataaaaccgcataattcacatgaaggtaaaacgttttatgttttaccgaatgatgacacgctacgtgttgaggcgtttgagtactaccacacgacggatccgagttttctgggtaggtacatgtcagcgttaaatcacacgaaaaagtggaaatacccgcaagttaatggtttaacgtctataaaatgggcggataacaactgttatcttgcgacggcgttgttaacgctccaacaaatagagttgaagtttaatccgccggcgctacaagatgcgtattacagagcgagggcgggtgaagcggcgaacttttgtgcgcttatattagcgtactgtaataagacggtaggtgagttaggtgatgttagagaaacgatgagttacttgtttcaacatgcgaatttagattcttgcaaaagagtcttgaacgtggtgtgtaaaacgtgtggacaacagcagacgacgcttaagggtgtagaagcggttatgtacatgggcacgctttcttatgaacaatttaagaaaggtgttcagataccgtgtacgtgtggtaaacaagcgacgaaatatctagtacaacaggagtcaccgtttgttatgatgtcagcgccgccggcgcagtatgaacttaagcatggtacgtttacgtgtgcgagtgagtacacgggtaattaccagtgtggtcactataaacatataacgtctaaagaaacgttgtattgcatagacggtgcgttacttacgaagtcctcagaatacaaaggtccgataacggatgttttctacaaagaaaacagttacacgacgacgataaaaccggttacgtataaattggatggtgttgtttgtacggaaatagacccgaagttggacaattattataagaaagacaattcttatttcacggagcaaccgatagatcttgtaccgaaccaaccgtatccgaacgcgagcttcgataattttaagtttgtatgtgataatataaaatttgcggatgatttaaaccagttaacgggttataagaaaccggcgtcaagagagcttaaagttacgtttttcccggacttaaatggtgatgtggtggcgatagattataaacactacacgccgtcttttaagaaaggagcgaaattgttacataaaccgatagtttggcatgttaacaatgcgacgaataaagcgacgtataaaccgaatacgtggtgtatacgttgtctttggagcacgaaaccggttgaaacgtcaaattcgtttgatgtactgaagtcagaggacgcgcagggaatggataatcttgcgtgcgaagatctaaaaccggtctctgaagaagtagtggaaaatccgacgatacagaaagacgttcttgagtgtaatgtgaaaacgacggaagttgtaggagacataatacttaaaccggcgaataatagtttaaaaataacggaagaggttggccacacggatctaatggcggcgtatgtagacaattctagtcttacgataaagaaaccgaatgaattatctagagtattaggtttgaaaacgcttgcgacgcatggtttagcggcggttaatagtgtcccgtgggatacgatagcgaattatgcgaagccgtttcttaacaaagttgttagtacgacgacgaacatagttacgcggtgtttaaaccgtgtttgtacgaattatatgccgtatttctttacgttattgctacaattgtgtacgtttacgagaagtacgaattctagaataaaagcgtctatgccgacgacgatagcgaagaatacggttaagagtgtcggtaaattttgtctagaggcgtcatttaattatttgaagtcaccgaatttttctaaactgataaatataataatatggtttttactattaagtgtttgcctaggttctttaatctactcaaccgctgctttaggtgttttaatgtctaatttaggcatgccttcttactgtactggttacagagaaggctatttgaactctactaatgtcactattgcaacctactgtactggttctataccttgtagtgtttgtcttagtggtttagattctttagacacctatccttctttagaaactatacaaattaccatttcatcttttaaatgggatttaactgcttttggcttagttgcagagtggtttttggcatatattcttttcactaggtttttctatgtacttggattggctgcaatcatgcaattgtttttcagctattttgcagtacattttattagtaattcttggcttatgtggttaataattaatcttgtacaaatggccccgatttcagctatggttagaatgtacatcttctttgcatcattttattatgtatggaaaagttatgtgcatgttgtagacggttgtaattcatcaacttgtatgatgtgttacaaacgtaatagagcaacaagagtcgaatgtacaactattgttaatggtgttagaaggtccttttatgtctatgctaatggaggtaaaggcttttgcaaactacacaattggaattgtgttaattgtgatacattctgtgctggtagtacatttattagtgatgaagttgcgagagacttgtcactacagtttaaaagaccaataaatcctactgaccagtcttcttacatcgttgatagtgttacagtgaagaatggttccatccatctttactttgataaagctggtcaaaagacttatgaaagacattctctctctcattttgttaacttagacaacctgagagctaataacactaaaggttcattgcctattaatgttatagtttttgatggtaaatcaaaatgtgaagaatcatctgcaaaatcagcgtctgtttactacagtcagcttatgtgtcaacctatactgttactagatcaggcattagtgtctgatgttggtgatagtgcggaagttgcagttaaaatgtttgatgcttacgttaatacgttttcatcaacttttaacgtaccaatggaaaaactcaaaacactagttgcaactgcagaagctgaacttgcaaagaatgtgtccttagacaatgtcttatctacttttatttcagcagctcggcaagggtttgttgattcagatgtagaaactaaagatgttgttgaatgtcttaaattgtcacatcaatctgacatagaagttactggcgatagttgtaataactatatgctcacctataacaaagttgaaaacatgacaccccgtgaccttggtgcttgtattgactgtagtgcgcgtcatattaatgcgcaggtagcaaaaagtcacaacattgctttgatatggaacgttaaagatttcatgtcattgtctgaacaactacgaaaacaaatacgtagtgctgctaaaaagaataacttaccttttaagttgacatgtgcaactactagacaagttgttaatgttgtaacaacaaagatagcacttaagggtggtaaaattgttaataattggttgaagcagttaattaaa

SEQ ID NO: 57 - DNA, 7059 bp, Artificial Sequence
  Clone pCC1-4K-SARS-CoV-2-4N-5. Based on SARS-CoV-2.
cgggtcccacgtgcgagcgcgaacataggttgtaaccatacgggtgttgttggagaaggttccgaaggtcttaatgacaaccttcttgaaatactccaaaaagagaaagtcaacataaatatagttggtgactttaaacttaatgaagagatagcgataatattggcgtctttttctgcgtccacgagtgcgtttgtggaaacggtgaaaggtttggattataaagcgttcaaacaaattgttgaatcctgtggtaattttaaagttacgaaaggaaaagcgaaaaaaggtgcgtggaatataggtgaacagaaatcaatactgagtccgctttatgcgtttgcgtcagaggcggcgcgtgttgtacgatcaatattctcccgcacgcttgaaacggcgcaaaattctgtgcgtgttttacagaaggcggcgataacgatactagatggaatatcacagtattcactgagactcatagatgcgatgatgttcacgtctgatttggcgacgaacaatctagttgtaatggcgtacataacgggtggtgttgttcagttgacgtcgcagtggctaacgaacatatttggcacggtttatgaaaaactcaaaccggtccttgattggcttgaagagaagtttaaggaaggtgtagagtttcttagagacggttgggaaatagttaaatttatatcaacgtgtgcgtgtgaaatagtcggtggacaaatagtcacgtgtgcgaaggaaataaaggagagtgttcagacgttctttaagcttgtaaataaatttttggcgttgtgtgcggactctataataataggtggagcgaaacttaaagcgttgaatttaggtgaaacgtttgtcacgcactcaaagggattgtacagaaagtgtgttaaatccagagaagaaacgggcctactcatgccgctaaaagcgccgaaagaaataatattcttagagggagaaacgcttccgacggaagtgttaacggaggaagttgtcttgaaaacgggtgatttacaaccgttagaacaaccgacgagtgaagcggttgaagcgccgttggttggtacgccggtttgtataaacgggcttatgttgctcgaaataaaagacacggaaaagtactgtgcgcttgcgccgaatatgatggtaacgaacaatacgttcacgctcaaaggcggtgcgccgacaaaggttacgtttggtgatgacacggtgatagaagtgcaaggttacaagagtgtgaatataacgtttgaacttgatgaaaggatagataaagtacttaatgagaagtgctctgcgtatacggttgaactcggtacggaagtaaatgagttcgcgtgtgttgtggcggatgcggtcataaaaacgttgcaaccggtatctgaattacttacgccgctgggcatagatttagatgagtggagtatggcgacgtactacttatttgatgagtctggtgagtttaaattggcgtcacatatgtattgttctttctacccgccggatgaggatgaagaagaaggtgattgtgaagaagaagagtttgagccgtcaacgcaatatgagtatggtacggaagatgattaccaaggtaaaccgttggaatttggtgcgacgtctgcggcgcttcaaccggaagaagagcaagaagaagattggttagatgatgatagtcaacaaacggttggtcaacaagacggcagtgaggacaatcagacgacgacgattcaaacgatagttgaggttcaaccgcaattagagatggaacttacgccggttgttcagacgatagaagtgaatagttttagtggttatttaaaacttacggacaatgtatacataaaaaatgcggacatagtggaagaagcgaaaaaggtaaaaccgacggtggttgttaatgcggcgaatgtttaccttaaacatggaggaggtgttgcgggagcgttaaataaggcgacgaacaatgcgatgcaagttgaatctgatgattacatagcgacgaatggaccgcttaaagtgggtggtagttgtgttttaagcggacacaatcttgcgaaacactgtcttcatgttgtcggcccgaatgttaacaaaggtgaagacatacaacttcttaagagtgcgtatgaaaattttaatcagcacgaagttctacttgcgccgttattatcagcgggtatatttggtgcggacccgatacattctttaagagtttgtgtagatacggttcgcacgaatgtctacttagcggtctttgataaaaatctctatgacaaacttgtttcaagctttttggaaatgaagagtgaaaagcaagttgaacaaaagatagcggagataccgaaagaggaagttaagccgtttataacggaaagtaaaccgtcagttgaacagagaaaacaagatgataagaaaataaaagcgtgtgttgaagaagttacgacgacgctggaagaaacgaagttcctcacggaaaacttgttactttatatagacataaatggcaatcttcatccggattctgcgacgcttgttagtgacatagacataacgttcttaaagaaagatgcgccgtatatagtgggtgatgttgttcaagagggtgttttaacggcggtggttataccgacgaaaaaggcgggtggcacgacggaaatgctagcgaaagcgttgagaaaagtgccgacggacaattatataacgacgtacccgggtcagggtttaaatggttacactgtagaggaggcaaagacagtgcttaaaaagtgtaaaagtgccttttacattctaccatctattatctctaatgagaagcaagaaattcttggaactgtttcttggaatttgcgagaaatgcttgcacatgcagaagaaacacgcaaattaatgcctgtctgtgtggaaactaaagccatagtttcaactatacagcgtaaatataagggtattaaaatacaagagggtgtggttgattatggtgctagattttacttttacaccagtaaaacaactgtagcgtcacttatcaacacacttaacgatctaaatgaaactcttgttacaatgccacttggctatgtaacacatggcttaaatttggaagaagctgctcggtatatgagatctctcaaagtgccagctacagtttctgtttcttcacctgatgctgttacagcgtataatggttatcttacttcttcttctaaaacacctgaagaacattttattgaaaccatctcacttgctggttcctataaagattggtcctattctggacaatctacacaactaggtatagaatttcttaagagaggtgataaaagtgtatattacactagtaatcctaccacattccacctagatggtgaagttatcacctttgacaatcttaagacacttctttctttgagagaagtgaggactattaaggtgtttacaacagtagacaacattaacctccacacgcaagttgtggacatgtcaatgacatatggacaacagtttggtccaacttatttggatggagctgatgttactaaaataaaacctcataattcacatgaaggtaaaacattttatgttttacctaatgatgacactctacgtgttgaggcttttgagtactaccacacaactgatcctagttttctgggtaggtacatgtcagcattaaatcacactaaaaagtggaaatacccacaagttaatggtttaacttctattaaatgggcagataacaactgttatcttgccactgcattgttaacactccaacaaatagagttgaagtttaatccacctgctctacaagatgcttattacagagcaagggctggtgaagctgctaacttttgtgcacttatcttagcctactgtaataagacagtaggtgagttaggtgatgttagagaaacaatgagttacttgtttcaacatgccaatttagattcttgcaaaagagtcttgaacgtggtgtgtaaaacttgtggacaacagcagacaacccttaagggtgtagaagctgttatgtacatgggcacactttcttatgaacaatttaagaaaggtgttcagataccttgtacgtgtggtaaacaagctacaaaatatctagtacaacaggagtcaccttttgttatgatgtcagcaccacctgctcagtatgaacttaagcatggtacatttacttgtgctagtgagtacactggtaattaccagtgtggtcactataaacatataacttctaaagaaactttgtattgcatagacggtgctttacttacaaagtcctcagaatacaaaggtcctattacggatgttttctacaaagaaaacagttacacaacaaccataaaaccagttacttataaattggatggtgttgtttgtacagaaattgaccctaagttggacaattattataagaaagacaattcttatttcacagagcaaccaattgatcttgtaccaaaccaaccatatccaaacgcaagcttcgataattttaagtttgtatgtgataatatcaaatttgctgatgatttaaaccagttaactggttataagaaacctgcttcaagagagcttaaagttacatttttccctgacttaaatggtgatgtggtggctattgattataaacactacacaccctcttttaagaaaggagctaaattgttacataaacctattgtttggcatgttaacaatgcaactaataaagccacgtataaaccaaatacctggtgtatacgttgtctttggagcacaaaaccagttgaaacatcaaattcgtttgatgtactgaagtcagaggacgcgcagggaatggataatcttgcctgcgaagatctaaaaccagtctctgaagaagtagtggaaaatcctaccatacagaaagacgttcttgagtgtaatgtgaaaactaccgaagttgtaggagacattatacttaaaccagcaaataatagtttaaaaattacagaagaggttggccacacagatctaatggctgcttatgtagacaattctagtcttactattaagaaacctaatgaattatctagagtattaggtttgaaaacccttgctactcatggtttagctgctgttaatagtgtcccttgggatactatagctaattatgctaagccttttcttaacaaagttgttagtacaactactaacatagttacacggtgtttaaaccgtgtttgtactaattatatgccttatttctttactttattgctacaattgtgtacttttactagaagtacaaattctagaattaaagcatctatgccgactactatagcaaagaatactgttaagagtgtcggtaaattttgtctagaggcttcatttaattatttgaagtcacctaatttttctaaactgataaatattataatttggtttttactattaagtgtttgcctaggttctttaatatactcaacggcggcgttaggtgttttaatgtctaatttaggcatgccgtcttactgtacgggttacagagaaggctatttgaactctacgaatgtcacgatagcgacgtactgtacgggttctataccgtgtagtgtttgtcttagtggtttagattctttagacacgtatccgtctttagaaacgatacaaataacgatatcatcttttaaatgggatttaacggcgtttggcttagttgcggagtggtttttggcgtatattcttttcacgaggtttttctatgtacttggattggcggcgataatgcaattgtttttcagctattttgcggtacattttataagtaattcttggcttatgtggttaataataaatcttgtacaaatggcgccgatatcagcgatggttagaatgtacatattctttgcgtcattttattatgtatggaaaagttatgtgcatgttgtagacggttgtaattcatcaacgtgtatgatgtgttacaaacgtaatagagcgacgagagtcgaatgtacgacgatagttaatggtgttagaaggtccttttatgtctatgcgaatggaggtaaaggcttttgcaaactacacaattggaattgtgttaattgtgatacgttctgtgcgggtagtacgtttataagtgatgaagttgcgagagacttgtcactacagtttaaaagaccgataaatccgacggaccagtcttcttacatagttgatagtgttacggtgaagaatggttccatacatctttactttgataaagcgggtcaaaagacgtatgaaagacattctctctctcattttgttaacttagacaacctgagagcgaataacacgaaaggttcattgccgataaatgttatagtttttgatggtaaatcaaaatgtgaagaatcatctgcgaaatcagcgtctgtttactacagtcagcttatgtgtcaaccgatactgttactagatcaggcgttagtgtctgatgttggtgatagtgcggaagttgcggttaaaatgtttgatgcgtacgttaatacgttttcatcaacgtttaacgtaccgatggaaaaactcaaaacgctagttgcgacggcggaagcggaacttgcgaagaatgtgtccttagacaatgtcttatctacgtttatatcagcggcgcggcaagggtttgttgattcagatgtagaaacgaaagatgttgttgaatgtcttaaattgtcacatcaatctgacatagaagttacgggcgatagttgtaataactatatgctcacgtataacaaagttgaaaacatgacgccgcgtgaccttggtgcgtgtatagactgtagtgcgcgtcatataaatgcgcaggtagcgaaaagtcacaacatagcgttgatatggaacgttaaagatttcatgtcattgtctgaacaactacgaaaacaaatacgtagtgcggcgaaaaagaataacttaccgtttaagttgacgtgtgcgacgacgagacaagttgttaatgttgtaacgacgaagatagcgcttaagggtggtaaaatagttaataattggttgaagcagttaattaaa

SEQ ID NO: 58 - DNA, 7059 bp, Artificial Sequence
  Clone pCC1-4K-SARS-CoV-2-4N-6. Based on SARS-CoV-2.
cgggtcccacgtgctagcgctaacataggttgtaaccatacaggtgttgttggagaaggttccgaaggtcttaatgacaaccttcttgaaatactccaaaaagagaaagtcaacatcaatattgttggtgactttaaacttaatgaagagatcgccattattttggcatctttttctgcttccacaagtgcttttgtggaaactgtgaaaggtttggattataaagcattcaaacaaattgttgaatcctgtggtaattttaaagttacaaaaggaaaagctaaaaaaggtgcctggaatattggtgaacagaaatcaatactgagtcctctttatgcatttgcatcagaggctgctcgtgttgtacgatcaattttctcccgcactcttgaaactgctcaaaattctgtgcgtgttttacagaaggccgctataacaatactagatggaatttcacagtattcactgagactcattgatgctatgatgttcacatctgatttggctactaacaatctagttgtaatggcctacattacaggtggtgttgttcagttgacttcgcagtggctaactaacatctttggcactgtttatgaaaaactcaaacccgtccttgattggcttgaagagaagtttaaggaaggtgtagagtttcttagagacggttgggaaattgttaaatttatctcaacctgtgcttgtgaaattgtcggtggacaaattgtcacctgtgcaaaggaaattaaggagagtgttcagacattctttaagcttgtaaataaatttttggctttgtgtgctgactctatcattattggtggagctaaacttaaagccttgaatttaggtgaaacatttgtcacgcactcaaagggattgtacagaaagtgtgttaaatccagagaagaaactggcctactcatgcctctaaaagccccaaaagaaattatcttcttagagggagaaacacttcccacagaagtgttaacagaggaagttgtcttgaaaactggtgatttacaaccattagaacaacctactagtgaagctgttgaagctccattggttggtacaccagtttgtattaacgggcttatgttgctcgaaatcaaagacacagaaaagtactgtgcccttgcacctaatatgatggtaacaaacaataccttcacactcaaaggcggtgcaccaacaaaggttacttttggtgatgacactgtgatagaagtgcaaggttacaagagtgtgaatatcacttttgaacttgatgaaaggattgataaagtacttaatgagaagtgctctgcctatacagttgaactcggtacagaagtaaatgagttcgcctgtgttgtggcagatgctgtcataaaaactttgcaaccagtatctgaattacttacaccactgggcattgatttagatgagtggagtatggctacatactacttatttgatgagtctggtgagtttaaattggcttcacatatgtattgttctttctaccctccagatgaggatgaagaagaaggtgattgtgaagaagaagagtttgagccatcaactcaatatgagtatggtactgaagatgattaccaaggtaaacctttggaatttggtgccacttctgctgctcttcaacctgaagaagagcaagaagaagattggttagatgatgatagtcaacaaactgttggtcaacaagacggcagtgaggacaatcagacaactactattcaaacaattgttgaggttcaacctcaattagagatggaacttacaccagttgttcagactattgaagtgaatagttttagtggttatttaaaacttactgacaatgtatacattaaaaatgcagacattgtggaagaagctaaaaaggtaaaaccaacagtggttgttaatgcagccaatgtttaccttaaacatggaggaggtgttgcaggagccttaaataaggctactaacaatgccatgcaagttgaatctgatgattacatagctactaatggaccacttaaagtgggtggtagttgtgttttaagcggacacaatcttgctaaacactgtcttcatgttgtcggcccaaatgttaacaaaggtgaagacattcaacttcttaagagtgcttatgaaaattttaatcagcacgaagttctacttgcaccattattatcagctggtatttttggtgctgaccctatacattctttaagagtttgtgtagatactgttcgcacaaatgtctacttagctgtctttgataaaaatctctatgacaaacttgtttcaagctttttggaaatgaagagtgaaaagcaagttgaacaaaagatcgctgagattcctaaagaggaagttaagccatttataactgaaagtaaaccttcagttgaacagagaaaacaagatgataagaaaatcaaagcttgtgttgaagaagttacaacaactctggaagaaactaagttcctcacagaaaacttgttactttatattgacattaatggcaatcttcatccagattctgccactcttgttagtgacattgacatcactttcttaaagaaagatgctccatatatagtgggtgatgttgttcaagagggtgttttaactgctgtggttatacctactaaaaaggctggtggcactactgaaatgctagcgaaagctttgagaaaagtgccaacagacaattatataaccacttacccgggtcagggtttaaatggttacacggtagaggaggcgaagacggtgcttaaaaagtgtaaaagtgcgttttacatactaccgtctataatatctaatgagaagcaagaaatacttggaacggtttcttggaatttgcgagaaatgcttgcgcatgcggaagaaacgcgcaaattaatgccggtctgtgtggaaacgaaagcgatagtttcaacgatacagcgtaaatataagggtataaaaatacaagagggtgtggttgattatggtgcgagattttacttttacacgagtaaaacgacggtagcgtcacttataaacacgcttaacgatctaaatgaaacgcttgttacgatgccgcttggctatgtaacgcatggcttaaatttggaagaagcggcgcggtatatgagatctctcaaagtgccggcgacggtttctgtttcttcaccggatgcggttacggcgtataatggttatcttacgtcttcttctaaaacgccggaagaacattttattgaaacgatatcacttgcgggttcctataaagattggtcctattctggacaatctacgcaactaggtatagaatttcttaagagaggtgataaaagtgtatattacacgagtaatccgacgacgttccacctagatggtgaagttataacgtttgacaatcttaagacgcttctttctttgagagaagtgaggacgataaaggtgtttacgacggtagacaacataaacctccacacgcaagttgtggacatgtcaatgacgtatggacaacagtttggtccgacgtatttggatggagcggatgttacgaaaataaaaccgcataattcacatgaaggtaaaacgttttatgttttaccgaatgatgacacgctacgtgttgaggcgtttgagtactaccacacgacggatccgagttttctgggtaggtacatgtcagcgttaaatcacacgaaaaagtggaaatacccgcaagttaatggtttaacgtctataaaatgggcggataacaactgttatcttgcgacggcgttgttaacgctccaacaaatagagttgaagtttaatccgccggcgctacaagatgcgtattacagagcgagggcgggtgaagcggcgaacttttgtgcgcttatattagcgtactgtaataagacggtaggtgagttaggtgatgttagagaaacgatgagttacttgtttcaacatgcgaatttagattcttgcaaaagagtcttgaacgtggtgtgtaaaacgtgtggacaacagcagacgacgcttaagggtgtagaagcggttatgtacatgggcacgctttcttatgaacaatttaagaaaggtgttcagataccgtgtacgtgtggtaaacaagcgacgaaatatctagtacaacaggagtcaccgtttgttatgatgtcagcgccgccggcgcagtatgaacttaagcatggtacgtttacgtgtgcgagtgagtacacgggtaattaccagtgtggtcactataaacatataacgtctaaagaaacgttgtattgcatagacggtgcgttacttacgaagtcctcagaatacaaaggtccgataacggatgttttctacaaagaaaacagttacacgacgacgataaaaccggttacgtataaattggatggtgttgtttgtacggaaatagacccgaagttggacaattattataagaaagacaattcttatttcacggagcaaccgatagatcttgtaccgaaccaaccgtatccgaacgcgagcttcgataattttaagtttgtatgtgataatataaaatttgcggatgatttaaaccagttaacgggttataagaaaccggcgtcaagagagcttaaagttacgtttttcccggacttaaatggtgatgtggtggcgatagattataaacactacacgccgtcttttaagaaaggagcgaaattgttacataaaccgatagtttggcatgttaacaatgcgacgaataaagcgacgtataaaccgaatacgtggtgtatacgttgtctttggagcacgaaaccggttgaaacgtcaaattcgtttgatgtactgaagtcagaggacgcgcagggaatggataatcttgcgtgcgaagatctaaaaccggtctctgaagaagtagtggaaaatccgacgatacagaaagacgttcttgagtgtaatgtgaaaacgacggaagttgtaggagacataatacttaaaccggcgaataatagtttaaaaataacggaagaggttggccacacggatctaatggcggcgtatgtagacaattctagtcttacgataaagaaaccgaatgaattatctagagtattaggtttgaaaacgcttgcgacgcatggtttagcggcggttaatagtgtcccgtgggatacgatagcgaattatgcgaagccgtttcttaacaaagttgttagtacgacgacgaacatagttacgcggtgtttaaaccgtgtttgtacgaattatatgccgtatttctttacgttattgctacaattgtgtacgtttacgagaagtacgaattctagaataaaagcgtctatgccgacgacgatagcgaagaatacggttaagagtgtcggtaaattttgtctagaggcgtcatttaattatttgaagtcaccgaatttttctaaactgataaatataataatatggtttttactattaagtgtttgcctaggttctttaatatactcaacggcggcgttaggtgttttaatgtctaatttaggcatgccgtcttactgtacgggttacagagaaggctatttgaactctacgaatgtcacgatagcgacgtactgtacgggttctataccgtgtagtgtttgtcttagtggtttagattctttagacacgtatccgtctttagaaacgatacaaataacgatatcatcttttaaatgggatttaacggcgtttggcttagttgcggagtggtttttggcgtatattcttttcacgaggtttttctatgtacttggattggcggcgataatgcaattgtttttcagctattttgcggtacattttataagtaattcttggcttatgtggttaataataaatcttgtacaaatggcgccgatatcagcgatggttagaatgtacatattctttgcgtcattttattatgtatggaaaagttatgtgcatgttgtagacggttgtaattcatcaacgtgtatgatgtgttacaaacgtaatagagcgacgagagtcgaatgtacgacgatagttaatggtgttagaaggtccttttatgtctatgcgaatggaggtaaaggcttttgcaaactacacaattggaattgtgttaattgtgatacgttctgtgcgggtagtacgtttataagtgatgaagttgcgagagacttgtcactacagtttaaaagaccgataaatccgacggaccagtcttcttacatagttgatagtgttacggtgaagaatggttccatacatctttactttgataaagcgggtcaaaagacgtatgaaagacattctctctctcattttgttaacttagacaacctgagagcgaataacacgaaaggttcattgccgataaatgttatagtttttgatggtaaatcaaaatgtgaagaatcatctgcgaaatcagcgtctgtttactacagtcagcttatgtgtcaaccgatactgttactagatcaggcgttagtgtctgatgttggtgatagtgcggaagttgcggttaaaatgtttgatgcgtacgttaatacgttttcatcaacgtttaacgtaccgatggaaaaactcaaaacgctagttgcgacggcggaagcggaacttgcgaagaatgtgtccttagacaatgtcttatctacgtttatatcagcggcgcggcaagggtttgttgattcagatgtagaaacgaaagatgttgttgaatgtcttaaattgtcacatcaatctgacatagaagttacgggcgatagttgtaataactatatgctcacgtataacaaagttgaaaacatgacgccgcgtgaccttggtgcgtgtatagactgtagtgcgcgtcatataaatgcgcaggtagcgaaaagtcacaacatagcgttgatatggaacgttaaagatttcatgtcattgtctgaacaactacgaaaacaaatacgtagtgcggcgaaaaagaataacttaccgtttaagttgacgtgtgcgacgacgagacaagttgttaatgttgtaacgacgaagatagcgcttaagggtggtaaaatagttaataattggttgaagcagttaattaaa

SEQ ID NO: 59 - DNA, 7059 bp, Artificial Sequence
  Clone pCC1-4K-SARS-CoV-2-4N-7. Based on SARS-CoV-2.
cgggtcccacgtgcgagcgcgaacataggttgtaaccatacgggtgttgttggagaaggttccgaaggtcttaatgacaaccttcttgaaatactccaaaaagagaaagtcaacataaatatagttggtgactttaaacttaatgaagagatagcgataatattggcgtctttttctgcgtccacgagtgcgtttgtggaaacggtgaaaggtttggattataaagcgttcaaacaaattgttgaatcctgtggtaattttaaagttacgaaaggaaaagcgaaaaaaggtgcgtggaatataggtgaacagaaatcaatactgagtccgctttatgcgtttgcgtcagaggcggcgcgtgttgtacgatcaatattctcccgcacgcttgaaacggcgcaaaattctgtgcgtgttttacagaaggcggcgataacgatactagatggaatatcacagtattcactgagactcatagatgcgatgatgttcacgtctgatttggcgacgaacaatctagttgtaatggcgtacataacgggtggtgttgttcagttgacgtcgcagtggctaacgaacatatttggcacggtttatgaaaaactcaaaccggtccttgattggcttgaagagaagtttaaggaaggtgtagagtttcttagagacggttgggaaatagttaaatttatatcaacgtgtgcgtgtgaaatagtcggtggacaaatagtcacgtgtgcgaaggaaataaaggagagtgttcagacgttctttaagcttgtaaataaatttttggcgttgtgtgcggactctataataataggtggagcgaaacttaaagcgttgaatttaggtgaaacgtttgtcacgcactcaaagggattgtacagaaagtgtgttaaatccagagaagaaacgggcctactcatgccgctaaaagcgccgaaagaaataatattcttagagggagaaacgcttccgacggaagtgttaacggaggaagttgtcttgaaaacgggtgatttacaaccgttagaacaaccgacgagtgaagcggttgaagcgccgttggttggtacgccggtttgtataaacgggcttatgttgctcgaaataaaagacacggaaaagtactgtgcgcttgcgccgaatatgatggtaacgaacaatacgttcacgctcaaaggcggtgcgccgacaaaggttacgtttggtgatgacacggtgatagaagtgcaaggttacaagagtgtgaatataacgtttgaacttgatgaaaggatagataaagtacttaatgagaagtgctctgcgtatacggttgaactcggtacggaagtaaatgagttcgcgtgtgttgtggcggatgcggtcataaaaacgttgcaaccggtatctgaattacttacgccgctgggcatagatttagatgagtggagtatggcgacgtactacttatttgatgagtctggtgagtttaaattggcgtcacatatgtattgttctttctacccgccggatgaggatgaagaagaaggtgattgtgaagaagaagagtttgagccgtcaacgcaatatgagtatggtacggaagatgattaccaaggtaaaccgttggaatttggtgcgacgtctgcggcgcttcaaccggaagaagagcaagaagaagattggttagatgatgatagtcaacaaacggttggtcaacaagacggcagtgaggacaatcagacgacgacgattcaaacgatagttgaggttcaaccgcaattagagatggaacttacgccggttgttcagacgatagaagtgaatagttttagtggttatttaaaacttacggacaatgtatacataaaaaatgcggacatagtggaagaagcgaaaaaggtaaaaccgacggtggttgttaatgcggcgaatgtttaccttaaacatggaggaggtgttgcgggagcgttaaataaggcgacgaacaatgcgatgcaagttgaatctgatgattacatagcgacgaatggaccgcttaaagtgggtggtagttgtgttttaagcggacacaatcttgcgaaacactgtcttcatgttgtcggcccgaatgttaacaaaggtgaagacatacaacttcttaagagtgcgtatgaaaattttaatcagcacgaagttctacttgcgccgttattatcagcgggtatatttggtgcggacccgatacattctttaagagtttgtgtagatacggttcgcacgaatgtctacttagcggtctttgataaaaatctctatgacaaacttgtttcaagctttttggaaatgaagagtgaaaagcaagttgaacaaaagatagcggagataccgaaagaggaagttaagccgtttataacggaaagtaaaccgtcagttgaacagagaaaacaagatgataagaaaataaaagcgtgtgttgaagaagttacgacgacgctggaagaaacgaagttcctcacggaaaacttgttactttatatagacataaatggcaatcttcatccggattctgcgacgcttgttagtgacatagacataacgttcttaaagaaagatgcgccgtatatagtgggtgatgttgttcaagagggtgttttaacggcggtggttataccgacgaaaaaggcgggtggcacgacggaaatgctagcgaaagcgttgagaaaagtgccgacggacaattatataacgacgtacccgggtcagggtttaaatggttacacggtagaggaggcgaagacggtgcttaaaaagtgtaaaagtgcgttttacatactaccgtctataatatctaatgagaagcaagaaatacttggaacggtttcttggaatttgcgagaaatgcttgcgcatgcggaagaaacgcgcaaattaatgccggtctgtgtggaaacgaaagcgatagtttcaacgatacagcgtaaatataagggtataaaaatacaagagggtgtggttgattatggtgcgagattttacttttacacgagtaaaacgacggtagcgtcacttataaacacgcttaacgatctaaatgaaacgcttgttacgatgccgcttggctatgtaacgcatggcttaaatttggaagaagcggcgcggtatatgagatctctcaaagtgccggcgacggtttctgtttcttcaccggatgcggttacggcgtataatggttatcttacgtcttcttctaaaacgccggaagaacattttattgaaacgatatcacttgcgggttcctataaagattggtcctattctggacaatctacgcaactaggtatagaatttcttaagagaggtgataaaagtgtatattacacgagtaatccgacgacgttccacctagatggtgaagttataacgtttgacaatcttaagacgcttctttctttgagagaagtgaggacgataaaggtgtttacgacggtagacaacataaacctccacacgcaagttgtggacatgtcaatgacgtatggacaacagtttggtccgacgtatttggatggagcggatgttacgaaaataaaaccgcataattcacatgaaggtaaaacgttttatgttttaccgaatgatgacacgctacgtgttgaggcgtttgagtactaccacacgacggatccgagttttctgggtaggtacatgtcagcgttaaatcacacgaaaaagtggaaatacccgcaagttaatggtttaacgtctataaaatgggcggataacaactgttatcttgcgacggcgttgttaacgctccaacaaatagagttgaagtttaatccgccggcgctacaagatgcgtattacagagcgagggcgggtgaagcggcgaacttttgtgcgcttatattagcgtactgtaataagacggtaggtgagttaggtgatgttagagaaacgatgagttacttgtttcaacatgcgaatttagattcttgcaaaagagtcttgaacgtggtgtgtaaaacgtgtggacaacagcagacgacgcttaagggtgtagaagcggttatgtacatgggcacgctttcttatgaacaatttaagaaaggtgttcagataccgtgtacgtgtggtaaacaagcgacgaaatatctagtacaacaggagtcaccgtttgttatgatgtcagcgccgccggcgcagtatgaacttaagcatggtacgtttacgtgtgcgagtgagtacacgggtaattaccagtgtggtcactataaacatataacgtctaaagaaacgttgtattgcatagacggtgcgttacttacgaagtcctcagaatacaaaggtccgataacggatgttttctacaaagaaaacagttacacgacgacgataaaaccggttacgtataaattggatggtgttgtttgtacggaaatagacccgaagttggacaattattataagaaagacaattcttatttcacggagcaaccgatagatcttgtaccgaaccaaccgtatccgaacgcgagcttcgataattttaagtttgtatgtgataatataaaatttgcggatgatttaaaccagttaacgggttataagaaaccggcgtcaagagagcttaaagttacgtttttcccggacttaaatggtgatgtggtggcgatagattataaacactacacgccgtcttttaagaaaggagcgaaattgttacataaaccgatagtttggcatgttaacaatgcgacgaataaagcgacgtataaaccgaatacgtggtgtatacgttgtctttggagcacgaaaccggttgaaacgtcaaattcgtttgatgtactgaagtcagaggacgcgcagggaatggataatcttgcgtgcgaagatctaaaaccggtctctgaagaagtagtggaaaatccgacgatacagaaagacgttcttgagtgtaatgtgaaaacgacggaagttgtaggagacataatacttaaaccggcgaataatagtttaaaaataacggaagaggttggccacacggatctaatggcggcgtatgtagacaattctagtcttacgataaagaaaccgaatgaattatctagagtattaggtttgaaaacgcttgcgacgcatggtttagcggcggttaatagtgtcccgtgggatacgatagcgaattatgcgaagccgtttcttaacaaagttgttagtacgacgacgaacatagttacgcggtgtttaaaccgtgtttgtacgaattatatgccgtatttctttacgttattgctacaattgtgtacgtttacgagaagtacgaattctagaataaaagcgtctatgccgacgacgatagcgaagaatacggttaagagtgtcggtaaattttgtctagaggcgtcatttaattatttgaagtcaccgaatttttctaaactgataaatataataatatggtttttactattaagtgtttgcctaggttctttaatatactcaacggcggcgttaggtgttttaatgtctaatttaggcatgccgtcttactgtacgggttacagagaaggctatttgaactctacgaatgtcacgatagcgacgtactgtacgggttctataccgtgtagtgtttgtcttagtggtttagattctttagacacgtatccgtctttagaaacgatacaaataacgatatcatcttttaaatgggatttaacggcgtttggcttagttgcggagtggtttttggcgtatattcttttcacgaggtttttctatgtacttggattggcggcgataatgcaattgtttttcagctattttgcggtacattttataagtaattcttggcttatgtggttaataataaatcttgtacaaatggcgccgatatcagcgatggttagaatgtacatattctttgcgtcattttattatgtatggaaaagttatgtgcatgttgtagacggttgtaattcatcaacgtgtatgatgtgttacaaacgtaatagagcgacgagagtcgaatgtacgacgatagttaatggtgttagaaggtccttttatgtctatgcgaatggaggtaaaggcttttgcaaactacacaattggaattgtgttaattgtgatacgttctgtgcgggtagtacgtttataagtgatgaagttgcgagagacttgtcactacagtttaaaagaccgataaatccgacggaccagtcttcttacatagttgatagtgttacggtgaagaatggttccatacatctttactttgataaagcgggtcaaaagacgtatgaaagacattctctctctcattttgttaacttagacaacctgagagcgaataacacgaaaggttcattgccgataaatgttatagtttttgatggtaaatcaaaatgtgaagaatcatctgcgaaatcagcgtctgtttactacagtcagcttatgtgtcaaccgatactgttactagatcaggcgttagtgtctgatgttggtgatagtgcggaagttgcggttaaaatgtttgatgcgtacgttaatacgttttcatcaacgtttaacgtaccgatggaaaaactcaaaacgctagttgcgacggcggaagcggaacttgcgaagaatgtgtccttagacaatgtcttatctacgtttatatcagcggcgcggcaagggtttgttgattcagatgtagaaacgaaagatgttgttgaatgtcttaaattgtcacatcaatctgacatagaagttacgggcgatagttgtaataactatatgctcacgtataacaaagttgaaaacatgacgccgcgtgaccttggtgcgtgtatagactgtagtgcgcgtcatataaatgcgcaggtagcgaaaagtcacaacatagcgttgatatggaacgttaaagatttcatgtcattgtctgaacaactacgaaaacaaatacgtagtgcggcgaaaaagaataacttaccgtttaagttgacgtgtgcgacgacgagacaagttgttaatgttgtaacgacgaagatagcgcttaagggtggtaaaatagttaataattggttgaagcagttaattaaa

SEQ ID NO: 60 - DNA, 7059 bp, Artificial Sequence
  Clone pCC1-4K-SARS-CoV-2-7N-1. Based on SARS-CoV-2.
cgggtcccacgtgctagcgctaacataggttgtaaccatacaggtgttgttggagaaggttccgaaggtcttaatgacaaccttcttgaaatactccaaaaagagaaagtcaacatcaatattgttggtgactttaaacttaatgaagagatcgccattattttggcatctttttctgcttccacaagtgcttttgtggaaactgtgaaaggtttggattataaagcattcaaacaaattgttgaatcctgtggtaattttaaagttacaaaaggaaaagctaaaaaaggtgcctggaatattggtgaacagaaatcaatactgagtcctctttatgcatttgcatcagaggctgctcgtgttgtacgatcaattttctcccgcactcttgaaactgctcaaaattctgtgcgtgttttacagaaggccgctataacaatactagatggaatttcacagtattcactgagactcattgatgctatgatgttcacatctgatttggctactaacaatctagttgtaatggcctacattacaggtggtgttgttcagttgacttcgcagtggctaactaacatctttggcactgtttatgaaaaactcaaacccgtccttgattggcttgaagagaagtttaaggaaggtgtagagtttcttagagacggttgggaaattgttaaatttatctcaacctgtgcttgtgaaattgtcggtggacaaattgtcacctgtgcaaaggaaattaaggagagtgttcagacattctttaagcttgtaaataaatttttggctttgtgtgctgactctatcattattggtggagctaaacttaaagccttgaatttaggtgaaacatttgtcacgcactcaaagggattgtacagaaagtgtgttaaatccagagaagaaactggcctactcatgcctctaaaagccccaaaagaaattatcttcttagagggagaaacacttcccacagaagtgttaacagaggaagttgtcttgaaaactggtgatttacaaccattagaacaacctactagtgaagctgttgaagctccattggttggtacaccagtttgtattaacgggcttatgttgctcgaaatcaaagacacagaaaagtactgtgcccttgcacctaatatgatggtaacaaacaataccttcacactcaaaggcggtgcaccaacaaaggttacttttggtgatgacactgtgatagaagtgcaaggttacaagagtgtgaatatcacttttgaacttgatgaaaggattgataaagtacttaatgagaagtgctctgcctatacagttgaactcggtacagaagtaaatgagttcgcctgtgttgtggcagatgctgtcataaaaactttgcaaccagtatctgaattacttacaccactgggcattgatttagatgagtggagtatggctacatactacttatttgatgagtctggtgagtttaaattggcttcacatatgtattgttctttctaccctccagatgaggatgaagaagaaggtgattgtgaagaagaagagtttgagccatcaactcaatatgagtatggtactgaagatgattaccaaggtaaacctttggaatttggtgccacttctgctgctcttcaacctgaagaagagcaagaagaagattggttagatgatgatagtcaacaaactgttggtcaacaagacggcagtgaggacaatcagacaactactattcaaacaattgttgaggttcaacctcaattagagatggaacttacaccagttgttcagactattgaagtgaatagttttagtggttatttaaaacttactgacaatgtatacattaaaaatgcagacattgtggaagaagctaaaaaggtaaaaccaacagtggttgttaatgcagccaatgtttaccttaaacatggaggaggtgttgcaggagccttaaataaggctactaacaatgccatgcaagttgaatctgatgattacatagctactaatggaccacttaaagtgggtggtagttgtgttttaagcggacacaatcttgctaaacactgtcttcatgttgtcggcccaaatgttaacaaaggtgaagacattcaacttcttaagagtgcttatgaaaattttaatcagcacgaagttctacttgcaccattattatcagctggtatttttggtgctgaccctatacattctttaagagtttgtgtagatactgttcgcacaaatgtctacttagctgtctttgataaaaatctctatgacaaacttgtttcaagctttttggaaatgaagagtgaaaagcaagttgaacaaaagatcgctgagattcctaaagaggaagttaagccatttataactgaaagtaaaccttcagttgaacagagaaaacaagatgataagaaaatcaaagcttgtgttgaagaagttacaacaactctggaagaaactaagttcctcacagaaaacttgttactttatattgacattaatggcaatcttcatccagattctgccactcttgttagtgacattgacatcactttcttaaagaaagatgctccatatatagtgggtgatgttgttcaagagggtgttttaactgctgtggttatacctactaaaaaggctggtggcactactgaaatgctagcgaaagctttgagaaaagtgccaacagacaattatataaccacttacccgggtcagggtttaaatggttacactgtagaggaggcaaagacagtgcttaaaaagtgtaaaagtgccttttacattctaccatctattatctctaatgagaagcaagaaattcttggaactgtttcttggaatttgcgagaaatgcttgcacatgcagaagaaacacgcaaattaatgcctgtctgtgtggaaactaaagccatagtttcaactatacagcgtaaatataagggtattaaaatacaagagggtgtggttgattatggtgctagattttacttttacaccagtaaaacaactgtagcgtcacttatcaacacacttaacgatctaaatgaaactcttgttacaatgccacttggctatgtaacacatggcttaaatttggaagaagctgctcggtatatgagatctctcaaagtgccagctacagtttctgtttcttcacctgatgctgttacagcgtataatggttatcttacttcttcttctaaaacacctgaagaacattttattgaaaccatctcacttgctggttcctataaagattggtcctattctggacaatctacacaactaggtatagaatttcttaagagaggtgataaaagtgtatattacactagtaatcctaccacattccacctagatggtgaagttatcacctttgacaatcttaagacacttctttctttgagagaagtgaggactattaaggtgtttacaacagtagacaacattaacctccacacgcaagttgtggacatgtcaatgacatatggacaacagtttggtccaacttatttggatggagctgatgttactaaaataaaacctcataattcacatgaaggtaaaacattttatgttttacctaatgatgacactctacgtgttgaggcttttgagtactaccacacaactgatcctagttttctgggtaggtacatgtcagcattaaatcacactaaaaagtggaaatacccacaagttaatggtttaacttctattaaatgggcagataacaactgttatcttgccactgcattgttaacactccaacaaatagagttgaagtttaatccacctgctctacaagatgcttattacagagcaagggctggtgaagctgctaacttttgtgcacttatcttagcctactgtaataagacagtaggtgagttaggtgatgttagagaaacaatgagttacttgtttcaacatgccaatttagattcttgcaaaagagtcttgaacgtggtgtgtaaaacttgtggacaacagcagacaacccttaagggtgtagaagctgttatgtacatgggcacactttcttatgaacaatttaagaaaggtgttcagataccttgtacgtgtggtaaacaagctacaaaatatctagtacaacaggagtcaccttttgttatgatgtcagcaccacctgctcagtatgaacttaagcatggtacatttacttgtgctagtgagtacactggtaattaccagtgtggtcactataaacatataacttctaaagaaactttgtattgcatagacggtgctttacttacaaagtcctcagaatacaaaggtcctattacggatgttttctacaaagaaaacagttacacaacaaccataaaaccagttacttataaattggatggtgttgtttgtacagaaattgaccctaagttggacaattattataagaaagacaattcttatttcacagagcaaccaattgatcttgtaccaaaccaaccatatccaaacgcaagcttcgataattttaagtttgtatgtgataatatcaaatttgctgatgatttaaaccagttaactggttataagaaacctgcttcaagagagcttaaagttacatttttccctgacttaaatggtgatgtggtggctattgattataaacactacacaccctcttttaagaaaggagctaaattgttacataaacctattgtttggcatgttaacaatgcaactaataaagccacgtataaaccaaatacctggtgtatacgttgtctttggagcacaaaaccagttgaaacatcaaattcgtttgatgtactgaagtcagaggacgcgcagggaatggataatcttgcctgcgaagatctaaaaccagtctctgaagaagtagtggaaaatcctaccatacagaaagacgttcttgagtgtaatgtgaaaactaccgaagttgtaggagacattatacttaaaccagcaaataatagtttaaaaattacagaagaggttggccacacagatctaatggctgcttatgtagacaattctagtcttactattaagaaacctaatgaattatctagagtattaggtttgaaaacccttgctactcatggtttagctgctgttaatagtgtcccttgggatactatagctaattatgctaagccttttcttaacaaagttgttagtacaactactaacatagttacacggtgtttaaaccgtgtttgtactaattatatgccttatttctttactttattgctacaattgtgtacttttactagaagtacaaattctagaattaaagcatctatgccgactactatagcaaagaatactgttaagagtgtcggtaaattttgtctagaggcttcatttaattatttgaagtcacctaatttttctaaactgataaatattataatttggtttttactattaagtgtttgcctaggttctttaatctactcaaccgcggcgttaggtgttttaatgtctaatttaggtatgccgtcttactgtacgggttaccgtgaaggttatttgaactctacgaatgtcacgattgcgacgtactgtacgggttctataccgtgtagtgtttgtcttagtggtttagattctttagacacgtatccgtctttagaaacgatacaaattacgatttcatcttttaaatgggatttaacggcgtttggtttagttgcggagtggtttttggcgtatattcttttcacgcgttttttctatgtacttggtttggcggcgatcatgcaattgtttttcagctattttgcggtacattttattagtaattcttggcttatgtggttaataattaatcttgtacaaatggcgccgatttcagcgatggttagaatgtacatcttctttgcgtcattttattatgtatggaaaagttatgtgcatgttgtagacggttgtaattcatcaacgtgtatgatgtgttacaaacgtaatagagcgacgcgtgtcgaatgtacgacgattgttaatggtgttagacgttccttttatgtctatgcgaatggtggtaaaggtttttgcaaactacacaattggaattgtgttaattgtgatacgttctgtgcgggtagtacgtttattagtgatgaagttgcgcgtgacttgtcactacagtttaaacgtccgataaatccgacggaccagtcttcttacatcgttgatagtgttacggtgaagaatggttccatccatctttactttgataaagcgggtcaaaagacgtatgaacgtcattctctctctcattttgttaacttagacaacctgcgtgcgaataacacgaaaggttcattgccgattaatgttatagtttttgatggtaaatcaaaatgtgaagaatcatctgcgaaatcagcgtctgtttactacagtcagcttatgtgtcaaccgatactgttactagatcaggcgttagtgtctgatgttggtgatagtgcggaagttgcggttaaaatgtttgatgcgtacgttaatacgttttcatcaacgtttaacgtaccgatggaaaaactcaaaacgctagttgcgacggcggaagcggaacttgcgaagaatgtgtccttagacaatgtcttatctacgtttatttcagcggcgcgtcaaggttttgttgattcagatgtagaaacgaaagatgttgttgaatgtcttaaattgtcacatcaatctgacatagaagttacgggtgatagttgtaataactatatgctcacgtataacaaagttgaaaacatgacgccgcgtgaccttggtgcgtgtattgactgtagtgcgcgtcatattaatgcgcaggtagcgaaaagtcacaacattgcgttgatatggaacgttaaagatttcatgtcattgtctgaacaactacgtaaacaaatacgtagtgcggcgaaaaagaataacttaccgtttaagttgacgtgtgcgacgacgcgtcaagttgttaatgttgtaacgacgaagatagcgcttaagggtggtaaaattgttaataattggttgaagcaattaattaaa

SEQ ID NO: 61 - DNA, 7059 bp, Artificial Sequence
  Clone pCC1-4K-SARS-CoV-2-7N-2. Based on SARS-CoV-2.
cgggtcccacgtgctagcgctaacataggttgtaaccatacaggtgttgttggagaaggttccgaaggtcttaatgacaaccttcttgaaatactccaaaaagagaaagtcaacatcaatattgttggtgactttaaacttaatgaagagatcgccattattttggcatctttttctgcttccacaagtgcttttgtggaaactgtgaaaggtttggattataaagcattcaaacaaattgttgaatcctgtggtaattttaaagttacaaaaggaaaagctaaaaaaggtgcctggaatattggtgaacagaaatcaatactgagtcctctttatgcatttgcatcagaggctgctcgtgttgtacgatcaattttctcccgcactcttgaaactgctcaaaattctgtgcgtgttttacagaaggccgctataacaatactagatggaatttcacagtattcactgagactcattgatgctatgatgttcacatctgatttggctactaacaatctagttgtaatggcctacattacaggtggtgttgttcagttgacttcgcagtggctaactaacatctttggcactgtttatgaaaaactcaaacccgtccttgattggcttgaagagaagtttaaggaaggtgtagagtttcttagagacggttgggaaattgttaaatttatctcaacctgtgcttgtgaaattgtcggtggacaaattgtcacctgtgcaaaggaaattaaggagagtgttcagacattctttaagcttgtaaataaatttttggctttgtgtgctgactctatcattattggtggagctaaacttaaagccttgaatttaggtgaaacatttgtcacgcactcaaagggattgtacagaaagtgtgttaaatccagagaagaaactggcctactcatgcctctaaaagccccaaaagaaattatcttcttagagggagaaacacttcccacagaagtgttaacagaggaagttgtcttgaaaactggtgatttacaaccattagaacaacctactagtgaagctgttgaagctccattggttggtacaccagtttgtattaacgggcttatgttgctcgaaatcaaagacacagaaaagtactgtgcccttgcacctaatatgatggtaacaaacaataccttcacactcaaaggcggtgcaccaacaaaggttacttttggtgatgacactgtgatagaagtgcaaggttacaagagtgtgaatatcacttttgaacttgatgaaaggattgataaagtacttaatgagaagtgctctgcctatacagttgaactcggtacagaagtaaatgagttcgcctgtgttgtggcagatgctgtcataaaaactttgcaaccagtatctgaattacttacaccactgggcattgatttagatgagtggagtatggctacatactacttatttgatgagtctggtgagtttaaattggcttcacatatgtattgttctttctaccctccagatgaggatgaagaagaaggtgattgtgaagaagaagagtttgagccatcaactcaatatgagtatggtactgaagatgattaccaaggtaaacctttggaatttggtgccacttctgctgctcttcaacctgaagaagagcaagaagaagattggttagatgatgatagtcaacaaactgttggtcaacaagacggcagtgaggacaatcagacaactactattcaaacaattgttgaggttcaacctcaattagagatggaacttacaccagttgttcagactattgaagtgaatagttttagtggttatttaaaacttactgacaatgtatacattaaaaatgcagacattgtggaagaagctaaaaaggtaaaaccaacagtggttgttaatgcagccaatgtttaccttaaacatggaggaggtgttgcaggagccttaaataaggctactaacaatgccatgcaagttgaatctgatgattacatagctactaatggaccacttaaagtgggtggtagttgtgttttaagcggacacaatcttgctaaacactgtcttcatgttgtcggcccaaatgttaacaaaggtgaagacattcaacttcttaagagtgcttatgaaaattttaatcagcacgaagttctacttgcaccattattatcagctggtatttttggtgctgaccctatacattctttaagagtttgtgtagatactgttcgcacaaatgtctacttagctgtctttgataaaaatctctatgacaaacttgtttcaagctttttggaaatgaagagtgaaaagcaagttgaacaaaagatcgctgagattcctaaagaggaagttaagccatttataactgaaagtaaaccttcagttgaacagagaaaacaagatgataagaaaatcaaagcttgtgttgaagaagttacaacaactctggaagaaactaagttcctcacagaaaacttgttactttatattgacattaatggcaatcttcatccagattctgccactcttgttagtgacattgacatcactttcttaaagaaagatgctccatatatagtgggtgatgttgttcaagagggtgttttaactgctgtggttatacctactaaaaaggctggtggcactactgaaatgctagcgaaagctttgagaaaagtgccaacagacaattatataaccacttacccgggtcaaggtttaaatggttacacggtagaggaggcgaagacggtgcttaaaaagtgtaaaagtgcgttttacatactaccgtctataatatctaatgagaagcaagaaatacttggtacggtttcttggaatttgcgggaaatgcttgcgcatgcggaagaaacgcgtaaattaatgccggtctgtgtggaaacgaaagcgatagtttcaacgatacagcgtaaatataagggtattaaaatacaagagggtgtggttgattatggtgcgcgtttttacttttacacgagtaaaacgacggtagcgtcacttatcaacacgcttaacgatctaaatgaaacgcttgttacgatgccgcttggttatgtaacgcatggtttaaatttggaagaagcggcgcgttatatgcgttctctcaaagtgccggcgacggtttctgtttcttcaccggatgcggttacggcgtataatggttatcttacgtcttcttctaaaacgccggaagaacattttattgaaacgatctcacttgcgggttcctataaagattggtcctattctggtcaatctacgcaactaggtatagaatttcttaagcgtggtgataaaagtgtatattacacgagtaatccgacgacgttccacctagatggtgaagttatcacgtttgacaatcttaagacgcttctttctttgcgtgaagtgcgtacgattaaggtgtttacgacggtagacaacattaacctccacacgcaagttgtggacatgtcaatgacgtatggtcaacagtttggtccgacgtatttggatggtgcggatgttacgaaaataaaaccgcataattcacatgaaggtaaaacgttttatgttttaccgaatgatgacacgctacgtgttgaggcgtttgagtactaccacacaacggatccgagttttctgggtcgttacatgtcagcgttaaatcacacgaaaaagtggaaatacccgcaagttaatggtttaacgtctattaaatgggcggataacaactgttatcttgcgacggcgttgttaacgctccaacaaatagagttgaagtttaatccgccggcgctacaagatgcgtattaccgtgcgcgtgcgggtgaagcggcgaacttttgtgcgcttatcttagcgtactgtaataagacggtaggtgagttaggtgatgttcgtgaaacgatgagttacttgtttcaacatgcgaatttagattcttgcaaacgtgtcttgaacgtggtgtgtaaaacgtgtggtcaacagcaaacgacgcttaagggtgtagaagcggttatgtacatgggtacactttcttatgaacaatttaagaaaggtgttcaaataccgtgtacgtgtggtaaacaagcgacaaaatatctagtacaacaggagtcaccgtttgttatgatgtcagcgccgccggcgcagtatgaacttaagcatggtacgtttacgtgtgcgagtgagtacacgggtaattaccagtgtggtcactataaacatataacgtctaaagaaacgttgtattgcatagacggtgcgttacttacgaagtcctcagaatacaaaggtccgattacggatgttttctacaaagaaaacagttacacaacaacgataaaaccggttacgtataaattggatggtgttgtttgtacggaaattgacccgaagttggacaattattataagaaagacaattcttatttcacggagcaaccgattgatcttgtaccgaaccaaccgtatccgaacgcgagcttcgataattttaagtttgtatgtgataatatcaaatttgcggatgatttaaaccaattaacgggttataagaaaccggcgtcacgtgagcttaaagttacatttttcccggacttaaatggtgatgtggtggcgattgattataaacactacacgccgtcttttaagaaaggtgcgaaattgttacataaaccgattgtttggcatgttaacaatgcgacgaataaagcgacgtataaaccgaatacgtggtgtatacgttgtctttggagcacgaaaccggttgaaacatcaaattcgtttgatgtactgaagtcagaggacgcgcagggtatggataatcttgcgtgcgaagatctaaaaccggtctctgaagaagtagtggaaaatccgacgatacagaaagacgttcttgagtgtaatgtgaaaacgacggaagttgtaggtgacattatacttaaaccggcgaataatagtttaaaaattacggaagaggttggtcacacagatctaatggcggcgtatgtagacaattctagtcttacgattaagaaaccgaatgaattatctcgtgtattaggtttgaaaacgcttgcgacgcatggtttagcggcggttaatagtgtcccgtgggatacgatagcgaattatgcgaagccgtttcttaacaaagttgttagtacgacgacgaacatagttacgcgttgtttaaaccgtgtttgtacgaattatatgccgtatttctttacgttattgctacaattgtgtacgtttacgcgtagtacgaattctcgtattaaagcgtctatgccgacgacgatagcgaagaatacggttaagagtgtcggtaaattttgtctagaggcgtcatttaattatttgaagtcaccgaatttttctaaactgataaatattataatttggtttttactattaagtgtttgcctaggttctttaatctactcaaccgctgctttaggtgttttaatgtctaatttaggcatgccttcttactgtactggttacagagaaggctatttgaactctactaatgtcactattgcaacctactgtactggttctataccttgtagtgtttgtcttagtggtttagattctttagacacctatccttctttagaaactatacaaattaccatttcatcttttaaatgggatttaactgcttttggcttagttgcagagtggtttttggcatatattcttttcactaggtttttctatgtacttggattggctgcaatcatgcaattgtttttcagctattttgcagtacattttattagtaattcttggcttatgtggttaataattaatcttgtacaaatggccccgatttcagctatggttagaatgtacatcttctttgcatcattttattatgtatggaaaagttatgtgcatgttgtagacggttgtaattcatcaacttgtatgatgtgttacaaacgtaatagagcaacaagagtcgaatgtacaactattgttaatggtgttagaaggtccttttatgtctatgctaatggaggtaaaggcttttgcaaactacacaattggaattgtgttaattgtgatacattctgtgctggtagtacatttattagtgatgaagttgcgagagacttgtcactacagtttaaaagaccaataaatcctactgaccagtcttcttacatcgttgatagtgttacagtgaagaatggttccatccatctttactttgataaagctggtcaaaagacttatgaaagacattctctctctcattttgttaacttagacaacctgagagctaataacactaaaggttcattgcctattaatgttatagtttttgatggtaaatcaaaatgtgaagaatcatctgcaaaatcagcgtctgtttactacagtcagcttatgtgtcaacctatactgttactagatcaggcattagtgtctgatgttggtgatagtgcggaagttgcagttaaaatgtttgatgcttacgttaatacgttttcatcaacttttaacgtaccaatggaaaaactcaaaacactagttgcaactgcagaagctgaacttgcaaagaatgtgtccttagacaatgtcttatctacttttatttcagcagctcggcaagggtttgttgattcagatgtagaaactaaagatgttgttgaatgtcttaaattgtcacatcaatctgacatagaagttactggcgatagttgtaataactatatgctcacctataacaaagttgaaaacatgacaccccgtgaccttggtgcttgtattgactgtagtgcgcgtcatattaatgcgcaggtagcaaaaagtcacaacattgctttgatatggaacgttaaagatttcatgtcattgtctgaacaactacgaaaacaaatacgtagtgctgctaaaaagaataacttaccttttaagttgacatgtgcaactactagacaagttgttaatgttgtaacaacaaagatagcacttaagggtggtaaaattgttaataattggttgaagcagttaattaaa

SEQ ID NO: 62 - DNA, 7059 bp, Artificial Sequence
  Clone pCC1-4K-SARS-CoV-2-7N-3. Based on SARS-CoV-2.
cgggtcccgcgtgcgagcgcgaacataggttgtaaccatacgggtgttgttggtgaaggttccgaaggtcttaatgacaaccttcttgaaatactccaaaaagagaaagtcaacataaatatagttggtgactttaaacttaatgaagagatagcgataatattggcgtctttttctgcgtccacgagtgcgtttgtggaaacagtgaaaggtttggattataaagcgttcaaacaaatagttgaatcctgtggtaattttaaagttacgaaaggtaaagcgaaaaaaggtgcgtggaatataggtgaacaaaaatcaatactgagtccgctttatgcgtttgcgtcagaggcggcgcgtgttgtacgttcaatattctcccgtacgcttgaaacggcgcaaaattctgtgcgtgttttacaaaaggcggcgataacgatactagatggtatatcacaatattcactgcgtctcatagatgcgatgatgttcacgtctgatttggcgacgaacaatctagttgtaatggcgtacataacgggtggtgttgttcaattgacgtcgcaatggctaacgaacatatttggtacggtttatgaaaaactcaaaccggtccttgattggcttgaagagaagtttaaggaaggtgtagagtttcttcgtgacggttgggaaatagttaaatttatatcaacgtgtgcgtgtgaaatagtcggtggtcaaatagtcacgtgtgcgaaggaaataaaggagagtgttcaaacgttctttaagcttgtaaataaatttttggcgttgtgtgcggactctataataataggtggtgcgaaacttaaagcgttgaatttaggtgaaacgtttgtcacgcactcaaagggtttgtaccgtaagtgtgttaaatcccgtgaagaaacgggtctactcatgccgctaaaagcgccgaaagaaataatattcttagagggtgaaacgcttccgacggaagtgttaacggaggaagttgtcttgaaaacgggtgatttacaaccgttagaacaaccgacgagtgaagcggttgaagcgccgttggttggtacgccggtttgtataaacggtcttatgttgctcgaaataaaagacacggaaaagtactgtgcgcttgcgccgaatatgatggtaacgaacaatacgttcacgctcaaaggtggtgcgccgacgaaggttacgtttggtgatgacacggtgatagaagtgcaaggttacaagagtgtgaatataacgtttgaacttgatgaacgtatagataaagtacttaatgagaagtgctctgcgtatacggttgaactcggtacggaagtaaatgagttcgcgtgtgttgtggcggatgcggtcataaaaacgttgcaaccggtatctgaattacttacgccgctgggtatagatttagatgagtggagtatggcgacgtactacttatttgatgagtctggtgagtttaaattggcgtcacatatgtattgttctttctacccgccggatgaggatgaagaagaaggtgattgtgaagaagaagagtttgagccgtcaacgcaatatgagtatggtacggaagatgattaccaaggtaaaccgttggaatttggtgcgacgtctgcggcgcttcaaccggaagaagagcaagaagaagattggttagatgatgatagtcaacaaacggttggtcaacaagacggtagtgaggacaatcaaacgacgacgatacaaacgatagttgaggttcaaccgcaattagagatggaacttacgccggttgttcaaacgatagaagtgaatagttttagtggttatttaaaacttacggacaatgtatacataaaaaatgcggacatagtggaagaagcgaaaaaggtaaaaccgacggtggttgttaatgcggcgaatgtttaccttaaacatggtggtggtgttgcgggtgcgttaaataaggcgacgaacaatgcgatgcaagttgaatctgatgattacatagcgacgaatggtccgcttaaagtgggtggtagttgtgttttaagcggtcacaatcttgcgaaacactgtcttcatgttgtcggtccgaatgttaacaaaggtgaagacattcaacttcttaagagtgcgtatgaaaattttaatcaacacgaagttctacttgcgccgttattatcagcgggtatatttggtgcggacccgatacattctttacgtgtttgtgtagatacggttcgtacgaatgtctacttagcggtctttgataaaaatctctatgacaaacttgtttcaagctttttggaaatgaagagtgaaaagcaagttgaacaaaagatagcagagataccgaaagaggaagttaagccgtttataacggaaagtaaaccgtcagttgaacagcgtaaacaagatgataagaaaataaaagcgtgtgttgaagaagttacgacgacgctggaagaaacgaagttcctcacggaaaacttgttactttatatagacataaatggtaatcttcatccggattctgcgacgcttgttagtgacatagacataacgttcttaaagaaagatgcgccgtatatagtgggtgatgttgttcaagagggtgttttaacggcggtggttataccgacgaaaaaggcgggtggtacgacggaaatgctagcgaaagcgttgcgtaaagtgccgacggacaattatataacgacgtacccgggtcagggtttaaatggttacactgtagaggaggcaaagacagtgcttaaaaagtgtaaaagtgccttttacattctaccatctattatctctaatgagaagcaagaaattcttggaactgtttcttggaatttgcgagaaatgcttgcacatgcagaagaaacacgcaaattaatgcctgtctgtgtggaaactaaagccatagtttcaactatacagcgtaaatataagggtattaaaatacaagagggtgtggttgattatggtgctagattttacttttacaccagtaaaacaactgtagcgtcacttatcaacacacttaacgatctaaatgaaactcttgttacaatgccacttggctatgtaacacatggcttaaatttggaagaagctgctcggtatatgagatctctcaaagtgccagctacagtttctgtttcttcacctgatgctgttacagcgtataatggttatcttacttcttcttctaaaacacctgaagaacattttattgaaaccatctcacttgctggttcctataaagattggtcctattctggacaatctacacaactaggtatagaatttcttaagagaggtgataaaagtgtatattacactagtaatcctaccacattccacctagatggtgaagttatcacctttgacaatcttaagacacttctttctttgagagaagtgaggactattaaggtgtttacaacagtagacaacattaacctccacacgcaagttgtggacatgtcaatgacatatggacaacagtttggtccaacttatttggatggagctgatgttactaaaataaaacctcataattcacatgaaggtaaaacattttatgttttacctaatgatgacactctacgtgttgaggcttttgagtactaccacacaactgatcctagttttctgggtaggtacatgtcagcattaaatcacactaaaaagtggaaatacccacaagttaatggtttaacttctattaaatgggcagataacaactgttatcttgccactgcattgttaacactccaacaaatagagttgaagtttaatccacctgctctacaagatgcttattacagagcaagggctggtgaagctgctaacttttgtgcacttatcttagcctactgtaataagacagtaggtgagttaggtgatgttagagaaacaatgagttacttgtttcaacatgccaatttagattcttgcaaaagagtcttgaacgtggtgtgtaaaacttgtggacaacagcagacaacccttaagggtgtagaagctgttatgtacatgggcacactttcttatgaacaatttaagaaaggtgttcagataccttgtacgtgtggtaaacaagctacaaaatatctagtacaacaggagtcaccttttgttatgatgtcagcaccacctgctcagtatgaacttaagcatggtacatttacttgtgctagtgagtacactggtaattaccagtgtggtcactataaacatataacttctaaagaaactttgtattgcatagacggtgctttacttacaaagtcctcagaatacaaaggtcctattacggatgttttctacaaagaaaacagttacacaacaaccataaaaccagttacttataaattggatggtgttgtttgtacagaaattgaccctaagttggacaattattataagaaagacaattcttatttcacagagcaaccaattgatcttgtaccaaaccaaccatatccaaacgcaagcttcgataattttaagtttgtatgtgataatatcaaatttgctgatgatttaaaccagttaactggttataagaaacctgcttcaagagagcttaaagttacatttttccctgacttaaatggtgatgtggtggctattgattataaacactacacaccctcttttaagaaaggagctaaattgttacataaacctattgtttggcatgttaacaatgcaactaataaagccacgtataaaccaaatacctggtgtatacgttgtctttggagcacaaaaccagttgaaacatcaaattcgtttgatgtactgaagtcagaggacgcgcagggaatggataatcttgcctgcgaagatctaaaaccagtctctgaagaagtagtggaaaatcctaccatacagaaagacgttcttgagtgtaatgtgaaaactaccgaagttgtaggagacattatacttaaaccagcaaataatagtttaaaaattacagaagaggttggccacacagatctaatggctgcttatgtagacaattctagtcttactattaagaaacctaatgaattatctagagtattaggtttgaaaacccttgctactcatggtttagctgctgttaatagtgtcccttgggatactatagctaattatgctaagccttttcttaacaaagttgttagtacaactactaacatagttacacggtgtttaaaccgtgtttgtactaattatatgccttatttctttactttattgctacaattgtgtacttttactagaagtacaaattctagaattaaagcatctatgccgactactatagcaaagaatactgttaagagtgtcggtaaattttgtctagaggcttcatttaattatttgaagtcacctaatttttctaaactgataaatattataatttggtttttactattaagtgtttgcctaggttctttaatctactcaaccgctgctttaggtgttttaatgtctaatttaggcatgccttcttactgtactggttacagagaaggctatttgaactctactaatgtcactattgcaacctactgtactggttctataccttgtagtgtttgtcttagtggtttagattctttagacacctatccttctttagaaactatacaaattaccatttcatcttttaaatgggatttaactgcttttggcttagttgcagagtggtttttggcatatattcttttcactaggtttttctatgtacttggattggctgcaatcatgcaattgtttttcagctattttgcagtacattttattagtaattcttggcttatgtggttaataattaatcttgtacaaatggccccgatttcagctatggttagaatgtacatcttctttgcatcattttattatgtatggaaaagttatgtgcatgttgtagacggttgtaattcatcaacttgtatgatgtgttacaaacgtaatagagcaacaagagtcgaatgtacaactattgttaatggtgttagaaggtccttttatgtctatgctaatggaggtaaaggcttttgcaaactacacaattggaattgtgttaattgtgatacattctgtgctggtagtacatttattagtgatgaagttgcgagagacttgtcactacagtttaaaagaccaataaatcctactgaccagtcttcttacatcgttgatagtgttacagtgaagaatggttccatccatctttactttgataaagctggtcaaaagacttatgaaagacattctctctctcattttgttaacttagacaacctgagagctaataacactaaaggttcattgcctattaatgttatagtttttgatggtaaatcaaaatgtgaagaatcatctgcaaaatcagcgtctgtttactacagtcagcttatgtgtcaacctatactgttactagatcaggcattagtgtctgatgttggtgatagtgcggaagttgcagttaaaatgtttgatgcttacgttaatacgttttcatcaacttttaacgtaccaatggaaaaactcaaaacactagttgcaactgcagaagctgaacttgcaaagaatgtgtccttagacaatgtcttatctacttttatttcagcagctcggcaagggtttgttgattcagatgtagaaactaaagatgttgttgaatgtcttaaattgtcacatcaatctgacatagaagttactggcgatagttgtaataactatatgctcacctataacaaagttgaaaacatgacaccccgtgaccttggtgcttgtattgactgtagtgcgcgtcatattaatgcgcaggtagcaaaaagtcacaacattgctttgatatggaacgttaaagatttcatgtcattgtctgaacaactacgaaaacaaatacgtagtgctgctaaaaagaataacttaccttttaagttgacatgtgcaactactagacaagttgttaatgttgtaacaacaaagatagcacttaagggtggtaaaattgttaataattggttgaagcagttaattaaa

SEQ ID NO: 63 - DNA, 7059 bp, Artificial Sequence
  Clone pCC1-4K-SARS-CoV-2-7N-4. Based on SARS-CoV-2.
cgggtcccgcgtgcgagcgcgaacataggttgtaaccatacgggtgttgttggtgaaggttccgaaggtcttaatgacaaccttcttgaaatactccaaaaagagaaagtcaacataaatatagttggtgactttaaacttaatgaagagatagcgataatattggcgtctttttctgcgtccacgagtgcgtttgtggaaacagtgaaaggtttggattataaagcgttcaaacaaatagttgaatcctgtggtaattttaaagttacgaaaggtaaagcgaaaaaaggtgcgtggaatataggtgaacaaaaatcaatactgagtccgctttatgcgtttgcgtcagaggcggcgcgtgttgtacgttcaatattctcccgtacgcttgaaacggcgcaaaattctgtgcgtgttttacaaaaggcggcgataacgatactagatggtatatcacaatattcactgcgtctcatagatgcgatgatgttcacgtctgatttggcgacgaacaatctagttgtaatggcgtacataacgggtggtgttgttcaattgacgtcgcaatggctaacgaacatatttggtacggtttatgaaaaactcaaaccggtccttgattggcttgaagagaagtttaaggaaggtgtagagtttcttcgtgacggttgggaaatagttaaatttatatcaacgtgtgcgtgtgaaatagtcggtggtcaaatagtcacgtgtgcgaaggaaataaaggagagtgttcaaacgttctttaagcttgtaaataaatttttggcgttgtgtgcggactctataataataggtggtgcgaaacttaaagcgttgaatttaggtgaaacgtttgtcacgcactcaaagggtttgtaccgtaagtgtgttaaatcccgtgaagaaacgggtctactcatgccgctaaaagcgccgaaagaaataatattcttagagggtgaaacgcttccgacggaagtgttaacggaggaagttgtcttgaaaacgggtgatttacaaccgttagaacaaccgacgagtgaagcggttgaagcgccgttggttggtacgccggtttgtataaacggtcttatgttgctcgaaataaaagacacggaaaagtactgtgcgcttgcgccgaatatgatggtaacgaacaatacgttcacgctcaaaggtggtgcgccgacgaaggttacgtttggtgatgacacggtgatagaagtgcaaggttacaagagtgtgaatataacgtttgaacttgatgaacgtatagataaagtacttaatgagaagtgctctgcgtatacggttgaactcggtacggaagtaaatgagttcgcgtgtgttgtggcggatgcggtcataaaaacgttgcaaccggtatctgaattacttacgccgctgggtatagatttagatgagtggagtatggcgacgtactacttatttgatgagtctggtgagtttaaattggcgtcacatatgtattgttctttctacccgccggatgaggatgaagaagaaggtgattgtgaagaagaagagtttgagccgtcaacgcaatatgagtatggtacggaagatgattaccaaggtaaaccgttggaatttggtgcgacgtctgcggcgcttcaaccggaagaagagcaagaagaagattggttagatgatgatagtcaacaaacggttggtcaacaagacggtagtgaggacaatcaaacgacgacgatacaaacgatagttgaggttcaaccgcaattagagatggaacttacgccggttgttcaaacgatagaagtgaatagttttagtggttatttaaaacttacggacaatgtatacataaaaaatgcggacatagtggaagaagcgaaaaaggtaaaaccgacggtggttgttaatgcggcgaatgtttaccttaaacatggtggtggtgttgcgggtgcgttaaataaggcgacgaacaatgcgatgcaagttgaatctgatgattacatagcgacgaatggtccgcttaaagtgggtggtagttgtgttttaagcggtcacaatcttgcgaaacactgtcttcatgttgtcggtccgaatgttaacaaaggtgaagacattcaacttcttaagagtgcgtatgaaaattttaatcaacacgaagttctacttgcgccgttattatcagcgggtatatttggtgcggacccgatacattctttacgtgtttgtgtagatacggttcgtacgaatgtctacttagcggtctttgataaaaatctctatgacaaacttgtttcaagctttttggaaatgaagagtgaaaagcaagttgaacaaaagatagcagagataccgaaagaggaagttaagccgtttataacggaaagtaaaccgtcagttgaacagcgtaaacaagatgataagaaaataaaagcgtgtgttgaagaagttacgacgacgctggaagaaacgaagttcctcacggaaaacttgttactttatatagacataaatggtaatcttcatccggattctgcgacgcttgttagtgacatagacataacgttcttaaagaaagatgcgccgtatatagtgggtgatgttgttcaagagggtgttttaacggcggtggttataccgacgaaaaaggcgggtggtacgacggaaatgctagcgaaagcgttgcgtaaagtgccgacggacaattatataacgacgtacccgggtcaaggtttaaatggttacacggtagaggaggcgaagacggtgcttaaaaagtgtaaaagtgcgttttacatactaccgtctataatatctaatgagaagcaagaaatacttggtacggtttcttggaatttgcgggaaatgcttgcgcatgcggaagaaacgcgtaaattaatgccggtctgtgtggaaacgaaagcgatagtttcaacgatacagcgtaaatataagggtattaaaatacaagagggtgtggttgattatggtgcgcgtttttacttttacacgagtaaaacgacggtagcgtcacttatcaacacgcttaacgatctaaatgaaacgcttgttacgatgccgcttggttatgtaacgcatggtttaaatttggaagaagcggcgcgttatatgcgttctctcaaagtgccggcgacggtttctgtttcttcaccggatgcggttacggcgtataatggttatcttacgtcttcttctaaaacgccggaagaacattttattgaaacgatctcacttgcgggttcctataaagattggtcctattctggtcaatctacgcaactaggtatagaatttcttaagcgtggtgataaaagtgtatattacacgagtaatccgacgacgttccacctagatggtgaagttatcacgtttgacaatcttaagacgcttctttctttgcgtgaagtgcgtacgattaaggtgtttacgacggtagacaacattaacctccacacgcaagttgtggacatgtcaatgacgtatggtcaacagtttggtccgacgtatttggatggtgcggatgttacgaaaataaaaccgcataattcacatgaaggtaaaacgttttatgttttaccgaatgatgacacgctacgtgttgaggcgtttgagtactaccacacaacggatccgagttttctgggtcgttacatgtcagcgttaaatcacacgaaaaagtggaaatacccgcaagttaatggtttaacgtctattaaatgggcggataacaactgttatcttgcgacggcgttgttaacgctccaacaaatagagttgaagtttaatccgccggcgctacaagatgcgtattaccgtgcgcgtgcgggtgaagcggcgaacttttgtgcgcttatcttagcgtactgtaataagacggtaggtgagttaggtgatgttcgtgaaacgatgagttacttgtttcaacatgcgaatttagattcttgcaaacgtgtcttgaacgtggtgtgtaaaacgtgtggtcaacagcaaacgacgcttaagggtgtagaagcggttatgtacatgggtacactttcttatgaacaatttaagaaaggtgttcaaataccgtgtacgtgtggtaaacaagcgacaaaatatctagtacaacaggagtcaccgtttgttatgatgtcagcgccgccggcgcagtatgaacttaagcatggtacgtttacgtgtgcgagtgagtacacgggtaattaccagtgtggtcactataaacatataacgtctaaagaaacgttgtattgcatagacggtgcgttacttacgaagtcctcagaatacaaaggtccgattacggatgttttctacaaagaaaacagttacacaacaacgataaaaccggttacgtataaattggatggtgttgtttgtacggaaattgacccgaagttggacaattattataagaaagacaattcttatttcacggagcaaccgattgatcttgtaccgaaccaaccgtatccgaacgcgagcttcgataattttaagtttgtatgtgataatatcaaatttgcggatgatttaaaccaattaacgggttataagaaaccggcgtcacgtgagcttaaagttacatttttcccggacttaaatggtgatgtggtggcgattgattataaacactacacgccgtcttttaagaaaggtgcgaaattgttacataaaccgattgtttggcatgttaacaatgcgacgaataaagcgacgtataaaccgaatacgtggtgtatacgttgtctttggagcacgaaaccggttgaaacatcaaattcgtttgatgtactgaagtcagaggacgcgcagggtatggataatcttgcgtgcgaagatctaaaaccggtctctgaagaagtagtggaaaatccgacgatacagaaagacgttcttgagtgtaatgtgaaaacgacggaagttgtaggtgacattatacttaaaccggcgaataatagtttaaaaattacggaagaggttggtcacacagatctaatggcggcgtatgtagacaattctagtcttacgattaagaaaccgaatgaattatctcgtgtattaggtttgaaaacgcttgcgacgcatggtttagcggcggttaatagtgtcccgtgggatacgatagcgaattatgcgaagccgtttcttaacaaagttgttagtacgacgacgaacatagttacgcgttgtttaaaccgtgtttgtacgaattatatgccgtatttctttacgttattgctacaattgtgtacgtttacgcgtagtacgaattctcgtattaaagcgtctatgccgacgacgatagcgaagaatacggttaagagtgtcggtaaattttgtctagaggcgtcatttaattatttgaagtcaccgaatttttctaaactgataaatattataatttggtttttactattaagtgtttgcctaggttctttaatctactcaaccgctgctttaggtgttttaatgtctaatttaggcatgccttcttactgtactggttacagagaaggctatttgaactctactaatgtcactattgcaacctactgtactggttctataccttgtagtgtttgtcttagtggtttagattctttagacacctatccttctttagaaactatacaaattaccatttcatcttttaaatgggatttaactgcttttggcttagttgcagagtggtttttggcatatattcttttcactaggtttttctatgtacttggattggctgcaatcatgcaattgtttttcagctattttgcagtacattttattagtaattcttggcttatgtggttaataattaatcttgtacaaatggccccgatttcagctatggttagaatgtacatcttctttgcatcattttattatgtatggaaaagttatgtgcatgttgtagacggttgtaattcatcaacttgtatgatgtgttacaaacgtaatagagcaacaagagtcgaatgtacaactattgttaatggtgttagaaggtccttttatgtctatgctaatggaggtaaaggcttttgcaaactacacaattggaattgtgttaattgtgatacattctgtgctggtagtacatttattagtgatgaagttgcgagagacttgtcactacagtttaaaagaccaataaatcctactgaccagtcttcttacatcgttgatagtgttacagtgaagaatggttccatccatctttactttgataaagctggtcaaaagacttatgaaagacattctctctctcattttgttaacttagacaacctgagagctaataacactaaaggttcattgcctattaatgttatagtttttgatggtaaatcaaaatgtgaagaatcatctgcaaaatcagcgtctgtttactacagtcagcttatgtgtcaacctatactgttactagatcaggcattagtgtctgatgttggtgatagtgcggaagttgcagttaaaatgtttgatgcttacgttaatacgttttcatcaacttttaacgtaccaatggaaaaactcaaaacactagttgcaactgcagaagctgaacttgcaaagaatgtgtccttagacaatgtcttatctacttttatttcagcagctcggcaagggtttgttgattcagatgtagaaactaaagatgttgttgaatgtcttaaattgtcacatcaatctgacatagaagttactggcgatagttgtaataactatatgctcacctataacaaagttgaaaacatgacaccccgtgaccttggtgcttgtattgactgtagtgcgcgtcatattaatgcgcaggtagcaaaaagtcacaacattgctttgatatggaacgttaaagatttcatgtcattgtctgaacaactacgaaaacaaatacgtagtgctgctaaaaagaataacttaccttttaagttgacatgtgcaactactagacaagttgttaatgttgtaacaacaaagatagcacttaagggtggtaaaattgttaataattggttgaagcagttaattaaa

SEQ ID NO: 64 - DNA, 7059 bp, Artificial Sequence
  Clone pCC1-4K-SARS-CoV-2-7N-5. Based on SARS-CoV-2.
cgggtcccgcgtgcgagcgcgaacataggttgtaaccatacgggtgttgttggtgaaggttccgaaggtcttaatgacaaccttcttgaaatactccaaaaagagaaagtcaacataaatatagttggtgactttaaacttaatgaagagatagcgataatattggcgtctttttctgcgtccacgagtgcgtttgtggaaacagtgaaaggtttggattataaagcgttcaaacaaatagttgaatcctgtggtaattttaaagttacgaaaggtaaagcgaaaaaaggtgcgtggaatataggtgaacaaaaatcaatactgagtccgctttatgcgtttgcgtcagaggcggcgcgtgttgtacgttcaatattctcccgtacgcttgaaacggcgcaaaattctgtgcgtgttttacaaaaggcggcgataacgatactagatggtatatcacaatattcactgcgtctcatagatgcgatgatgttcacgtctgatttggcgacgaacaatctagttgtaatggcgtacataacgggtggtgttgttcaattgacgtcgcaatggctaacgaacatatttggtacggtttatgaaaaactcaaaccggtccttgattggcttgaagagaagtttaaggaaggtgtagagtttcttcgtgacggttgggaaatagttaaatttatatcaacgtgtgcgtgtgaaatagtcggtggtcaaatagtcacgtgtgcgaaggaaataaaggagagtgttcaaacgttctttaagcttgtaaataaatttttggcgttgtgtgcggactctataataataggtggtgcgaaacttaaagcgttgaatttaggtgaaacgtttgtcacgcactcaaagggtttgtaccgtaagtgtgttaaatcccgtgaagaaacgggtctactcatgccgctaaaagcgccgaaagaaataatattcttagagggtgaaacgcttccgacggaagtgttaacggaggaagttgtcttgaaaacgggtgatttacaaccgttagaacaaccgacgagtgaagcggttgaagcgccgttggttggtacgccggtttgtataaacggtcttatgttgctcgaaataaaagacacggaaaagtactgtgcgcttgcgccgaatatgatggtaacgaacaatacgttcacgctcaaaggtggtgcgccgacgaaggttacgtttggtgatgacacggtgatagaagtgcaaggttacaagagtgtgaatataacgtttgaacttgatgaacgtatagataaagtacttaatgagaagtgctctgcgtatacggttgaactcggtacggaagtaaatgagttcgcgtgtgttgtggcggatgcggtcataaaaacgttgcaaccggtatctgaattacttacgccgctgggtatagatttagatgagtggagtatggcgacgtactacttatttgatgagtctggtgagtttaaattggcgtcacatatgtattgttctttctacccgccggatgaggatgaagaagaaggtgattgtgaagaagaagagtttgagccgtcaacgcaatatgagtatggtacggaagatgattaccaaggtaaaccgttggaatttggtgcgacgtctgcggcgcttcaaccggaagaagagcaagaagaagattggttagatgatgatagtcaacaaacggttggtcaacaagacggtagtgaggacaatcaaacgacgacgatacaaacgatagttgaggttcaaccgcaattagagatggaacttacgccggttgttcaaacgatagaagtgaatagttttagtggttatttaaaacttacggacaatgtatacataaaaaatgcggacatagtggaagaagcgaaaaaggtaaaaccgacggtggttgttaatgcggcgaatgtttaccttaaacatggtggtggtgttgcgggtgcgttaaataaggcgacgaacaatgcgatgcaagttgaatctgatgattacatagcgacgaatggtccgcttaaagtgggtggtagttgtgttttaagcggtcacaatcttgcgaaacactgtcttcatgttgtcggtccgaatgttaacaaaggtgaagacattcaacttcttaagagtgcgtatgaaaattttaatcaacacgaagttctacttgcgccgttattatcagcgggtatatttggtgcggacccgatacattctttacgtgtttgtgtagatacggttcgtacgaatgtctacttagcggtctttgataaaaatctctatgacaaacttgtttcaagctttttggaaatgaagagtgaaaagcaagttgaacaaaagatagcagagataccgaaagaggaagttaagccgtttataacggaaagtaaaccgtcagttgaacagcgtaaacaagatgataagaaaataaaagcgtgtgttgaagaagttacgacgacgctggaagaaacgaagttcctcacggaaaacttgttactttatatagacataaatggtaatcttcatccggattctgcgacgcttgttagtgacatagacataacgttcttaaagaaagatgcgccgtatatagtgggtgatgttgttcaagagggtgttttaacggcggtggttataccgacgaaaaaggcgggtggtacgacggaaatgctagcgaaagcgttgcgtaaagtgccgacggacaattatataacgacgtacccgggtcagggtttaaatggttacactgtagaggaggcaaagacagtgcttaaaaagtgtaaaagtgccttttacattctaccatctattatctctaatgagaagcaagaaattcttggaactgtttcttggaatttgcgagaaatgcttgcacatgcagaagaaacacgcaaattaatgcctgtctgtgtggaaactaaagccatagtttcaactatacagcgtaaatataagggtattaaaatacaagagggtgtggttgattatggtgctagattttacttttacaccagtaaaacaactgtagcgtcacttatcaacacacttaacgatctaaatgaaactcttgttacaatgccacttggctatgtaacacatggcttaaatttggaagaagctgctcggtatatgagatctctcaaagtgccagctacagtttctgtttcttcacctgatgctgttacagcgtataatggttatcttacttcttcttctaaaacacctgaagaacattttattgaaaccatctcacttgctggttcctataaagattggtcctattctggacaatctacacaactaggtatagaatttcttaagagaggtgataaaagtgtatattacactagtaatcctaccacattccacctagatggtgaagttatcacctttgacaatcttaagacacttctttctttgagagaagtgaggactattaaggtgtttacaacagtagacaacattaacctccacacgcaagttgtggacatgtcaatgacatatggacaacagtttggtccaacttatttggatggagctgatgttactaaaataaaacctcataattcacatgaaggtaaaacattttatgttttacctaatgatgacactctacgtgttgaggcttttgagtactaccacacaactgatcctagttttctgggtaggtacatgtcagcattaaatcacactaaaaagtggaaatacccacaagttaatggtttaacttctattaaatgggcagataacaactgttatcttgccactgcattgttaacactccaacaaatagagttgaagtttaatccacctgctctacaagatgcttattacagagcaagggctggtgaagctgctaacttttgtgcacttatcttagcctactgtaataagacagtaggtgagttaggtgatgttagagaaacaatgagttacttgtttcaacatgccaatttagattcttgcaaaagagtcttgaacgtggtgtgtaaaacttgtggacaacagcagacaacccttaagggtgtagaagctgttatgtacatgggcacactttcttatgaacaatttaagaaaggtgttcagataccttgtacgtgtggtaaacaagctacaaaatatctagtacaacaggagtcaccttttgttatgatgtcagcaccacctgctcagtatgaacttaagcatggtacatttacttgtgctagtgagtacactggtaattaccagtgtggtcactataaacatataacttctaaagaaactttgtattgcatagacggtgctttacttacaaagtcctcagaatacaaaggtcctattacggatgttttctacaaagaaaacagttacacaacaaccataaaaccagttacttataaattggatggtgttgtttgtacagaaattgaccctaagttggacaattattataagaaagacaattcttatttcacagagcaaccaattgatcttgtaccaaaccaaccatatccaaacgcaagcttcgataattttaagtttgtatgtgataatatcaaatttgctgatgatttaaaccagttaactggttataagaaacctgcttcaagagagcttaaagttacatttttccctgacttaaatggtgatgtggtggctattgattataaacactacacaccctcttttaagaaaggagctaaattgttacataaacctattgtttggcatgttaacaatgcaactaataaagccacgtataaaccaaatacctggtgtatacgttgtctttggagcacaaaaccagttgaaacatcaaattcgtttgatgtactgaagtcagaggacgcgcagggaatggataatcttgcctgcgaagatctaaaaccagtctctgaagaagtagtggaaaatcctaccatacagaaagacgttcttgagtgtaatgtgaaaactaccgaagttgtaggagacattatacttaaaccagcaaataatagtttaaaaattacagaagaggttggccacacagatctaatggctgcttatgtagacaattctagtcttactattaagaaacctaatgaattatctagagtattaggtttgaaaacccttgctactcatggtttagctgctgttaatagtgtcccttgggatactatagctaattatgctaagccttttcttaacaaagttgttagtacaactactaacatagttacacggtgtttaaaccgtgtttgtactaattatatgccttatttctttactttattgctacaattgtgtacttttactagaagtacaaattctagaattaaagcatctatgccgactactatagcaaagaatactgttaagagtgtcggtaaattttgtctagaggcttcatttaattatttgaagtcacctaatttttctaaactgataaatattataatttggtttttactattaagtgtttgcctaggttctttaatctactcaaccgcggcgttaggtgttttaatgtctaatttaggtatgccgtcttactgtacgggttaccgtgaaggttatttgaactctacgaatgtcacgattgcgacgtactgtacgggttctataccgtgtagtgtttgtcttagtggtttagattctttagacacgtatccgtctttagaaacgatacaaattacgatttcatcttttaaatgggatttaacggcgtttggtttagttgcggagtggtttttggcgtatattcttttcacgcgttttttctatgtacttggtttggcggcgatcatgcaattgtttttcagctattttgcggtacattttattagtaattcttggcttatgtggttaataattaatcttgtacaaatggcgccgatttcagcgatggttagaatgtacatcttctttgcgtcattttattatgtatggaaaagttatgtgcatgttgtagacggttgtaattcatcaacgtgtatgatgtgttacaaacgtaatagagcgacgcgtgtcgaatgtacgacgattgttaatggtgttagacgttccttttatgtctatgcgaatggtggtaaaggtttttgcaaactacacaattggaattgtgttaattgtgatacgttctgtgcgggtagtacgtttattagtgatgaagttgcgcgtgacttgtcactacagtttaaacgtccgataaatccgacggaccagtcttcttacatcgttgatagtgttacggtgaagaatggttccatccatctttactttgataaagcgggtcaaaagacgtatgaacgtcattctctctctcattttgttaacttagacaacctgcgtgcgaataacacgaaaggttcattgccgattaatgttatagtttttgatggtaaatcaaaatgtgaagaatcatctgcgaaatcagcgtctgtttactacagtcagcttatgtgtcaaccgatactgttactagatcaggcgttagtgtctgatgttggtgatagtgcggaagttgcggttaaaatgtttgatgcgtacgttaatacgttttcatcaacgtttaacgtaccgatggaaaaactcaaaacgctagttgcgacggcggaagcggaacttgcgaagaatgtgtccttagacaatgtcttatctacgtttatttcagcggcgcgtcaaggttttgttgattcagatgtagaaacgaaagatgttgttgaatgtcttaaattgtcacatcaatctgacatagaagttacgggtgatagttgtaataactatatgctcacgtataacaaagttgaaaacatgacgccgcgtgaccttggtgcgtgtattgactgtagtgcgcgtcatattaatgcgcaggtagcgaaaagtcacaacattgcgttgatatggaacgttaaagatttcatgtcattgtctgaacaactacgtaaacaaatacgtagtgcggcgaaaaagaataacttaccgtttaagttgacgtgtgcgacgacgcgtcaagttgttaatgttgtaacgacgaagatagcgcttaagggtggtaaaattgttaataattggttgaagcaattaattaaa

SEQ ID NO: 65 - DNA, 7059 bp, Artificial Sequence
  Clone pCC1-4K-SARS-CoV-2-7N-6. Based on SARS-CoV-2.
cgggtcccacgtgctagcgctaacataggttgtaaccatacaggtgttgttggagaaggttccgaaggtcttaatgacaaccttcttgaaatactccaaaaagagaaagtcaacatcaatattgttggtgactttaaacttaatgaagagatcgccattattttggcatctttttctgcttccacaagtgcttttgtggaaactgtgaaaggtttggattataaagcattcaaacaaattgttgaatcctgtggtaattttaaagttacaaaaggaaaagctaaaaaaggtgcctggaatattggtgaacagaaatcaatactgagtcctctttatgcatttgcatcagaggctgctcgtgttgtacgatcaattttctcccgcactcttgaaactgctcaaaattctgtgcgtgttttacagaaggccgctataacaatactagatggaatttcacagtattcactgagactcattgatgctatgatgttcacatctgatttggctactaacaatctagttgtaatggcctacattacaggtggtgttgttcagttgacttcgcagtggctaactaacatctttggcactgtttatgaaaaactcaaacccgtccttgattggcttgaagagaagtttaaggaaggtgtagagtttcttagagacggttgggaaattgttaaatttatctcaacctgtgcttgtgaaattgtcggtggacaaattgtcacctgtgcaaaggaaattaaggagagtgttcagacattctttaagcttgtaaataaatttttggctttgtgtgctgactctatcattattggtggagctaaacttaaagccttgaatttaggtgaaacatttgtcacgcactcaaagggattgtacagaaagtgtgttaaatccagagaagaaactggcctactcatgcctctaaaagccccaaaagaaattatcttcttagagggagaaacacttcccacagaagtgttaacagaggaagttgtcttgaaaactggtgatttacaaccattagaacaacctactagtgaagctgttgaagctccattggttggtacaccagtttgtattaacgggcttatgttgctcgaaatcaaagacacagaaaagtactgtgcccttgcacctaatatgatggtaacaaacaataccttcacactcaaaggcggtgcaccaacaaaggttacttttggtgatgacactgtgatagaagtgcaaggttacaagagtgtgaatatcacttttgaacttgatgaaaggattgataaagtacttaatgagaagtgctctgcctatacagttgaactcggtacagaagtaaatgagttcgcctgtgttgtggcagatgctgtcataaaaactttgcaaccagtatctgaattacttacaccactgggcattgatttagatgagtggagtatggctacatactacttatttgatgagtctggtgagtttaaattggcttcacatatgtattgttctttctaccctccagatgaggatgaagaagaaggtgattgtgaagaagaagagtttgagccatcaactcaatatgagtatggtactgaagatgattaccaaggtaaacctttggaatttggtgccacttctgctgctcttcaacctgaagaagagcaagaagaagattggttagatgatgatagtcaacaaactgttggtcaacaagacggcagtgaggacaatcagacaactactattcaaacaattgttgaggttcaacctcaattagagatggaacttacaccagttgttcagactattgaagtgaatagttttagtggttatttaaaacttactgacaatgtatacattaaaaatgcagacattgtggaagaagctaaaaaggtaaaaccaacagtggttgttaatgcagccaatgtttaccttaaacatggaggaggtgttgcaggagccttaaataaggctactaacaatgccatgcaagttgaatctgatgattacatagctactaatggaccacttaaagtgggtggtagttgtgttttaagcggacacaatcttgctaaacactgtcttcatgttgtcggcccaaatgttaacaaaggtgaagacattcaacttcttaagagtgcttatgaaaattttaatcagcacgaagttctacttgcaccattattatcagctggtatttttggtgctgaccctatacattctttaagagtttgtgtagatactgttcgcacaaatgtctacttagctgtctttgataaaaatctctatgacaaacttgtttcaagctttttggaaatgaagagtgaaaagcaagttgaacaaaagatcgctgagattcctaaagaggaagttaagccatttataactgaaagtaaaccttcagttgaacagagaaaacaagatgataagaaaatcaaagcttgtgttgaagaagttacaacaactctggaagaaactaagttcctcacagaaaacttgttactttatattgacattaatggcaatcttcatccagattctgccactcttgttagtgacattgacatcactttcttaaagaaagatgctccatatatagtgggtgatgttgttcaagagggtgttttaactgctgtggttatacctactaaaaaggctggtggcactactgaaatgctagcgaaagctttgagaaaagtgccaacagacaattatataaccacttacccgggtcaaggtttaaatggttacacggtagaggaggcgaagacggtgcttaaaaagtgtaaaagtgcgttttacatactaccgtctataatatctaatgagaagcaagaaatacttggtacggtttcttggaatttgcgggaaatgcttgcgcatgcggaagaaacgcgtaaattaatgccggtctgtgtggaaacgaaagcgatagtttcaacgatacagcgtaaatataagggtattaaaatacaagagggtgtggttgattatggtgcgcgtttttacttttacacgagtaaaacgacggtagcgtcacttatcaacacgcttaacgatctaaatgaaacgcttgttacgatgccgcttggttatgtaacgcatggtttaaatttggaagaagcggcgcgttatatgcgttctctcaaagtgccggcgacggtttctgtttcttcaccggatgcggttacggcgtataatggttatcttacgtcttcttctaaaacgccggaagaacattttattgaaacgatctcacttgcgggttcctataaagattggtcctattctggtcaatctacgcaactaggtatagaatttcttaagcgtggtgataaaagtgtatattacacgagtaatccgacgacgttccacctagatggtgaagttatcacgtttgacaatcttaagacgcttctttctttgcgtgaagtgcgtacgattaaggtgtttacgacggtagacaacattaacctccacacgcaagttgtggacatgtcaatgacgtatggtcaacagtttggtccgacgtatttggatggtgcggatgttacgaaaataaaaccgcataattcacatgaaggtaaaacgttttatgttttaccgaatgatgacacgctacgtgttgaggcgtttgagtactaccacacaacggatccgagttttctgggtcgttacatgtcagcgttaaatcacacgaaaaagtggaaatacccgcaagttaatggtttaacgtctattaaatgggcggataacaactgttatcttgcgacggcgttgttaacgctccaacaaatagagttgaagtttaatccgccggcgctacaagatgcgtattaccgtgcgcgtgcgggtgaagcggcgaacttttgtgcgcttatcttagcgtactgtaataagacggtaggtgagttaggtgatgttcgtgaaacgatgagttacttgtttcaacatgcgaatttagattcttgcaaacgtgtcttgaacgtggtgtgtaaaacgtgtggtcaacagcaaacgacgcttaagggtgtagaagcggttatgtacatgggtacactttcttatgaacaatttaagaaaggtgttcaaataccgtgtacgtgtggtaaacaagcgacaaaatatctagtacaacaggagtcaccgtttgttatgatgtcagcgccgccggcgcagtatgaacttaagcatggtacgtttacgtgtgcgagtgagtacacgggtaattaccagtgtggtcactataaacatataacgtctaaagaaacgttgtattgcatagacggtgcgttacttacgaagtcctcagaatacaaaggtccgattacggatgttttctacaaagaaaacagttacacaacaacgataaaaccggttacgtataaattggatggtgttgtttgtacggaaattgacccgaagttggacaattattataagaaagacaattcttatttcacggagcaaccgattgatcttgtaccgaaccaaccgtatccgaacgcgagcttcgataattttaagtttgtatgtgataatatcaaatttgcggatgatttaaaccaattaacgggttataagaaaccggcgtcacgtgagcttaaagttacatttttcccggacttaaatggtgatgtggtggcgattgattataaacactacacgccgtcttttaagaaaggtgcgaaattgttacataaaccgattgtttggcatgttaacaatgcgacgaataaagcgacgtataaaccgaatacgtggtgtatacgttgtctttggagcacgaaaccggttgaaacatcaaattcgtttgatgtactgaagtcagaggacgcgcagggtatggataatcttgcgtgcgaagatctaaaaccggtctctgaagaagtagtggaaaatccgacgatacagaaagacgttcttgagtgtaatgtgaaaacgacggaagttgtaggtgacattatacttaaaccggcgaataatagtttaaaaattacggaagaggttggtcacacagatctaatggcggcgtatgtagacaattctagtcttacgattaagaaaccgaatgaattatctcgtgtattaggtttgaaaacgcttgcgacgcatggtttagcggcggttaatagtgtcccgtgggatacgatagcgaattatgcgaagccgtttcttaacaaagttgttagtacgacgacgaacatagttacgcgttgtttaaaccgtgtttgtacgaattatatgccgtatttctttacgttattgctacaattgtgtacgtttacgcgtagtacgaattctcgtattaaagcgtctatgccgacgacgatagcgaagaatacggttaagagtgtcggtaaattttgtctagaggcgtcatttaattatttgaagtcaccgaatttttctaaactgataaatattataatttggtttttactattaagtgtttgcctaggttctttaatctactcaaccgcggcgttaggtgttttaatgtctaatttaggtatgccgtcttactgtacgggttaccgtgaaggttatttgaactctacgaatgtcacgattgcgacgtactgtacgggttctataccgtgtagtgtttgtcttagtggtttagattctttagacacgtatccgtctttagaaacgatacaaattacgatttcatcttttaaatgggatttaacggcgtttggtttagttgcggagtggtttttggcgtatattcttttcacgcgttttttctatgtacttggtttggcggcgatcatgcaattgtttttcagctattttgcggtacattttattagtaattcttggcttatgtggttaataattaatcttgtacaaatggcgccgatttcagcgatggttagaatgtacatcttctttgcgtcattttattatgtatggaaaagttatgtgcatgttgtagacggttgtaattcatcaacgtgtatgatgtgttacaaacgtaatagagcgacgcgtgtcgaatgtacgacgattgttaatggtgttagacgttccttttatgtctatgcgaatggtggtaaaggtttttgcaaactacacaattggaattgtgttaattgtgatacgttctgtgcgggtagtacgtttattagtgatgaagttgcgcgtgacttgtcactacagtttaaacgtccgataaatccgacggaccagtcttcttacatcgttgatagtgttacggtgaagaatggttccatccatctttactttgataaagcgggtcaaaagacgtatgaacgtcattctctctctcattttgttaacttagacaacctgcgtgcgaataacacgaaaggttcattgccgattaatgttatagtttttgatggtaaatcaaaatgtgaagaatcatctgcgaaatcagcgtctgtttactacagtcagcttatgtgtcaaccgatactgttactagatcaggcgttagtgtctgatgttggtgatagtgcggaagttgcggttaaaatgtttgatgcgtacgttaatacgttttcatcaacgtttaacgtaccgatggaaaaactcaaaacgctagttgcgacggcggaagcggaacttgcgaagaatgtgtccttagacaatgtcttatctacgtttatttcagcggcgcgtcaaggttttgttgattcagatgtagaaacgaaagatgttgttgaatgtcttaaattgtcacatcaatctgacatagaagttacgggtgatagttgtaataactatatgctcacgtataacaaagttgaaaacatgacgccgcgtgaccttggtgcgtgtattgactgtagtgcgcgtcatattaatgcgcaggtagcgaaaagtcacaacattgcgttgatatggaacgttaaagatttcatgtcattgtctgaacaactacgtaaacaaatacgtagtgcggcgaaaaagaataacttaccgtttaagttgacgtgtgcgacgacgcgtcaagttgttaatgttgtaacgacgaagatagcgcttaagggtggtaaaattgttaataattggttgaagcaattaattaaa

SEQ ID NO: 66 - DNA, 7059 bp, Artificial Sequence
  Clone pCC1-4K-SARS-CoV-2-7N-7. Based on SARS-CoV-2.
cgggtcccgcgtgcgagcgcgaacataggttgtaaccatacgggtgttgttggtgaaggttccgaaggtcttaatgacaaccttcttgaaatactccaaaaagagaaagtcaacataaatatagttggtgactttaaacttaatgaagagatagcgataatattggcgtctttttctgcgtccacgagtgcgtttgtggaaacagtgaaaggtttggattataaagcgttcaaacaaatagttgaatcctgtggtaattttaaagttacgaaaggtaaagcgaaaaaaggtgcgtggaatataggtgaacaaaaatcaatactgagtccgctttatgcgtttgcgtcagaggcggcgcgtgttgtacgttcaatattctcccgtacgcttgaaacggcgcaaaattctgtgcgtgttttacaaaaggcggcgataacgatactagatggtatatcacaatattcactgcgtctcatagatgcgatgatgttcacgtctgatttggcgacgaacaatctagttgtaatggcgtacataacgggtggtgttgttcaattgacgtcgcaatggctaacgaacatatttggtacggtttatgaaaaactcaaaccggtccttgattggcttgaagagaagtttaaggaaggtgtagagtttcttcgtgacggttgggaaatagttaaatttatatcaacgtgtgcgtgtgaaatagtcggtggtcaaatagtcacgtgtgcgaaggaaataaaggagagtgttcaaacgttctttaagcttgtaaataaatttttggcgttgtgtgcggactctataataataggtggtgcgaaacttaaagcgttgaatttaggtgaaacgtttgtcacgcactcaaagggtttgtaccgtaagtgtgttaaatcccgtgaagaaacgggtctactcatgccgctaaaagcgccgaaagaaataatattcttagagggtgaaacgcttccgacggaagtgttaacggaggaagttgtcttgaaaacgggtgatttacaaccgttagaacaaccgacgagtgaagcggttgaagcgccgttggttggtacgccggtttgtataaacggtcttatgttgctcgaaataaaagacacggaaaagtactgtgcgcttgcgccgaatatgatggtaacgaacaatacgttcacgctcaaaggtggtgcgccgacgaaggttacgtttggtgatgacacggtgatagaagtgcaaggttacaagagtgtgaatataacgtttgaacttgatgaacgtatagataaagtacttaatgagaagtgctctgcgtatacggttgaactcggtacggaagtaaatgagttcgcgtgtgttgtggcggatgcggtcataaaaacgttgcaaccggtatctgaattacttacgccgctgggtatagatttagatgagtggagtatggcgacgtactacttatttgatgagtctggtgagtttaaattggcgtcacatatgtattgttctttctacccgccggatgaggatgaagaagaaggtgattgtgaagaagaagagtttgagccgtcaacgcaatatgagtatggtacggaagatgattaccaaggtaaaccgttggaatttggtgcgacgtctgcggcgcttcaaccggaagaagagcaagaagaagattggttagatgatgatagtcaacaaacggttggtcaacaagacggtagtgaggacaatcaaacgacgacgatacaaacgatagttgaggttcaaccgcaattagagatggaacttacgccggttgttcaaacgatagaagtgaatagttttagtggttatttaaaacttacggacaatgtatacataaaaaatgcggacatagtggaagaagcgaaaaaggtaaaaccgacggtggttgttaatgcggcgaatgtttaccttaaacatggtggtggtgttgcgggtgcgttaaataaggcgacgaacaatgcgatgcaagttgaatctgatgattacatagcgacgaatggtccgcttaaagtgggtggtagttgtgttttaagcggtcacaatcttgcgaaacactgtcttcatgttgtcggtccgaatgttaacaaaggtgaagacattcaacttcttaagagtgcgtatgaaaattttaatcaacacgaagttctacttgcgccgttattatcagcgggtatatttggtgcggacccgatacattctttacgtgtttgtgtagatacggttcgtacgaatgtctacttagcggtctttgataaaaatctctatgacaaacttgtttcaagctttttggaaatgaagagtgaaaagcaagttgaacaaaagatagcagagataccgaaagaggaagttaagccgtttataacggaaagtaaaccgtcagttgaacagcgtaaacaagatgataagaaaataaaagcgtgtgttgaagaagttacgacgacgctggaagaaacgaagttcctcacggaaaacttgttactttatatagacataaatggtaatcttcatccggattctgcgacgcttgttagtgacatagacataacgttcttaaagaaagatgcgccgtatatagtgggtgatgttgttcaagagggtgttttaacggcggtggttataccgacgaaaaaggcgggtggtacgacggaaatgctagcgaaagcgttgcgtaaagtgccgacggacaattatataacgacgtacccgggtcaaggtttaaatggttacacggtagaggaggcgaagacggtgcttaaaaagtgtaaaagtgcgttttacatactaccgtctataatatctaatgagaagcaagaaatacttggtacggtttcttggaatttgcgggaaatgcttgcgcatgcggaagaaacgcgtaaattaatgccggtctgtgtggaaacgaaagcgatagtttcaacgatacagcgtaaatataagggtattaaaatacaagagggtgtggttgattatggtgcgcgtttttacttttacacgagtaaaacgacggtagcgtcacttatcaacacgcttaacgatctaaatgaaacgcttgttacgatgccgcttggttatgtaacgcatggtttaaatttggaagaagcggcgcgttatatgcgttctctcaaagtgccggcgacggtttctgtttcttcaccggatgcggttacggcgtataatggttatcttacgtcttcttctaaaacgccggaagaacattttattgaaacgatctcacttgcgggttcctataaagattggtcctattctggtcaatctacgcaactaggtatagaatttcttaagcgtggtgataaaagtgtatattacacgagtaatccgacgacgttccacctagatggtgaagttatcacgtttgacaatcttaagacgcttctttctttgcgtgaagtgcgtacgattaaggtgtttacgacggtagacaacattaacctccacacgcaagttgtggacatgtcaatgacgtatggtcaacagtttggtccgacgtatttggatggtgcggatgttacgaaaataaaaccgcataattcacatgaaggtaaaacgttttatgttttaccgaatgatgacacgctacgtgttgaggcgtttgagtactaccacacaacggatccgagttttctgggtcgttacatgtcagcgttaaatcacacgaaaaagtggaaatacccgcaagttaatggtttaacgtctattaaatgggcggataacaactgttatcttgcgacggcgttgttaacgctccaacaaatagagttgaagtttaatccgccggcgctacaagatgcgtattaccgtgcgcgtgcgggtgaagcggcgaacttttgtgcgcttatcttagcgtactgtaataagacggtaggtgagttaggtgatgttcgtgaaacgatgagttacttgtttcaacatgcgaatttagattcttgcaaacgtgtcttgaacgtggtgtgtaaaacgtgtggtcaacagcaaacgacgcttaagggtgtagaagcggttatgtacatgggtacactttcttatgaacaatttaagaaaggtgttcaaataccgtgtacgtgtggtaaacaagcgacaaaatatctagtacaacaggagtcaccgtttgttatgatgtcagcgccgccggcgcagtatgaacttaagcatggtacgtttacgtgtgcgagtgagtacacgggtaattaccagtgtggtcactataaacatataacgtctaaagaaacgttgtattgcatagacggtgcgttacttacgaagtcctcagaatacaaaggtccgattacggatgttttctacaaagaaaacagttacacaacaacgataaaaccggttacgtataaattggatggtgttgtttgtacggaaattgacccgaagttggacaattattataagaaagacaattcttatttcacggagcaaccgattgatcttgtaccgaaccaaccgtatccgaacgcgagcttcgataattttaagtttgtatgtgataatatcaaatttgcggatgatttaaaccaattaacgggttataagaaaccggcgtcacgtgagcttaaagttacatttttcccggacttaaatggtgatgtggtggcgattgattataaacactacacgccgtcttttaagaaaggtgcgaaattgttacataaaccgattgtttggcatgttaacaatgcgacgaataaagcgacgtataaaccgaatacgtggtgtatacgttgtctttggagcacgaaaccggttgaaacatcaaattcgtttgatgtactgaagtcagaggacgcgcagggtatggataatcttgcgtgcgaagatctaaaaccggtctctgaagaagtagtggaaaatccgacgatacagaaagacgttcttgagtgtaatgtgaaaacgacggaagttgtaggtgacattatacttaaaccggcgaataatagtttaaaaattacggaagaggttggtcacacagatctaatggcggcgtatgtagacaattctagtcttacgattaagaaaccgaatgaattatctcgtgtattaggtttgaaaacgcttgcgacgcatggtttagcggcggttaatagtgtcccgtgggatacgatagcgaattatgcgaagccgtttcttaacaaagttgttagtacgacgacgaacatagttacgcgttgtttaaaccgtgtttgtacgaattatatgccgtatttctttacgttattgctacaattgtgtacgtttacgcgtagtacgaattctcgtattaaagcgtctatgccgacgacgatagcgaagaatacggttaagagtgtcggtaaattttgtctagaggcgtcatttaattatttgaagtcaccgaatttttctaaactgataaatattataatttggtttttactattaagtgtttgcctaggttctttaatctactcaaccgcggcgttaggtgttttaatgtctaatttaggtatgccgtcttactgtacgggttaccgtgaaggttatttgaactctacgaatgtcacgattgcgacgtactgtacgggttctataccgtgtagtgtttgtcttagtggtttagattctttagacacgtatccgtctttagaaacgatacaaattacgatttcatcttttaaatgggatttaacggcgtttggtttagttgcggagtggtttttggcgtatattcttttcacgcgttttttctatgtacttggtttggcggcgatcatgcaattgtttttcagctattttgcggtacattttattagtaattcttggcttatgtggttaataattaatcttgtacaaatggcgccgatttcagcgatggttagaatgtacatcttctttgcgtcattttattatgtatggaaaagttatgtgcatgttgtagacggttgtaattcatcaacgtgtatgatgtgttacaaacgtaatagagcgacgcgtgtcgaatgtacgacgattgttaatggtgttagacgttccttttatgtctatgcgaatggtggtaaaggtttttgcaaactacacaattggaattgtgttaattgtgatacgttctgtgcgggtagtacgtttattagtgatgaagttgcgcgtgacttgtcactacagtttaaacgtccgataaatccgacggaccagtcttcttacatcgttgatagtgttacggtgaagaatggttccatccatctttactttgataaagcgggtcaaaagacgtatgaacgtcattctctctctcattttgttaacttagacaacctgcgtgcgaataacacgaaaggttcattgccgattaatgttatagtttttgatggtaaatcaaaatgtgaagaatcatctgcgaaatcagcgtctgtttactacagtcagcttatgtgtcaaccgatactgttactagatcaggcgttagtgtctgatgttggtgatagtgcggaagttgcggttaaaatgtttgatgcgtacgttaatacgttttcatcaacgtttaacgtaccgatggaaaaactcaaaacgctagttgcgacggcggaagcggaacttgcgaagaatgtgtccttagacaatgtcttatctacgtttatttcagcggcgcgtcaaggttttgttgattcagatgtagaaacgaaagatgttgttgaatgtcttaaattgtcacatcaatctgacatagaagttacgggtgatagttgtaataactatatgctcacgtataacaaagttgaaaacatgacgccgcgtgaccttggtgcgtgtattgactgtagtgcgcgtcatattaatgcgcaggtagcgaaaagtcacaacattgcgttgatatggaacgttaaagatttcatgtcattgtctgaacaactacgtaaacaaatacgtagtgcggcgaaaaagaataacttaccgtttaagttgacgtgtgcgacgacgcgtcaagttgttaatgttgtaacgacgaagatagcgcttaagggtggtaaaattgttaataattggttgaagcaattaattaaa

SEQ ID NO: 67 - DNA, 35283 bp, Artificial Sequence
  Clone pCCI-4K-SARS-CoV-2-4N-1-Delta. Based on SARS-CoV-2.
gatgtgctgcaaggcgattaagttgggtaacgccagggttttcccagtcacgacgttgtaaaacgacggccagtgaattgtaatacgactcactatagggcgaattctagttattaatagtaatcaattacggggtcattagttcatagcccatatatggagttccgcgttacataacttacggtaaatggcccgcctggctgaccgcccaacgacccccgcccattgacgtcaataatgacgtatgttcccatagtaacgccaatagggactttccattgacgtcaatgggtggagtatttacggtaaactgcccacttggcagtacatcaagtgtatcatatgccaagtacgccccctattgacgtcaatgacggtaaatggcccgcctggcattatgcccagtacatgaccttatgggactttcctacttggcagtacatctacgtattagtcatcgctattaccatggtgatgcggttttggcagtacatcaatgggcgtggatagcggtttgactcacggggatttccaagtctccaccccattgacgtcaatgggagtttgttttggcaccaaaatcaacgggactttccaaaatgtcgtaacaactccgccccattgacgcaaatgggcggtaggcgtgtacggtgggaggtctatataagcagagctggtttagtgaaccgtattaaaggtttataccttcccaggtaacaaaccaaccaactttcgatctcttgtagatctgttctctaaacgaactttaaaatctgtgtggctgtcactcggctgcatgcttagtgcactcacgcagtataattaataactaattactgtcgttgacaggacacgagtaactcgtctatcttctgcaggctgcttacggtttcgtccgtgttgcagccgatcatcagcacatctaggtttcgtccgggtgtgaccgaaaggtaagatggagagccttgtccctggtttcaacgagaaaacacacgtccaactcagtttgcctgttttacaggttcgcgacgtgctcgtacgtggctttggagactccgtggaggaggtcttatcagaggcacgtcaacatcttaaagatggcacttgtggcttagtagaagttgaaaaaggcgttttgcctcaacttgaacagccctatgtgttcatcaaacgttcggatgctcgaactgcacctcatggtcatgttatggttgagctggtagcagaactcgaaggcattcagtacggtcgtagtggtgagacacttggtgtccttgtccctcatgtgggcgaaataccagtggcttaccgcaaggttcttcttcgtaagaacggtaataaaggagctggtggccatagttacggcgccgatctaaagtcatttgacttaggcgacgagcttggcactgatccttatgaagattttcaagaaaactggaacactaaacatagcagtggtgttacccgtgaactcatgcgtgagcttaacggaggggcatacactcgctatgtcgataacaacttctgtggccctgatggctaccctcttgagtgcattaaagaccttctagcacgtgctggtaaagcttcatgcactttgtccgaacaactggactttattgacactaagaggggtgtatactgctgccgtgaacatgagcatgaaattgcttggtacacggaacgttctgaaaagagctatgaattgcagacaccttttgaaattaaattggcaaagaaatttgacaccttcaatggggaatgtccaaattttgtatttcccttaaattccataatcaagactattcaaccaagggttgaaaagaaaaagcttgatggctttatgggtagaattcgatctgtctatccagttgcgtcaccaaatgaatgcaaccaaatgtgcctttcaactctcatgaagtgtgatcattgtggtgaaacttcatggcagacgggcgattttgttaaagccacttgcgaattttgtggcactgagaatttgactaaagaaggtgccactacttgtggttacttaccccaaaatgctgttgttaaaatttattgtccagcatgtcacaattcagaagtaggacctgagcatagtcttgccgaataccataatgaatctggcttgaaaaccattcttcgtaagggtggtcgcactattgcctttggaggctgtgtgttctcttatgttggttgccataacaagtgtgcctattgggtcccacgtgctagcgctaacataggttgtaaccatacaggtgttgttggagaaggttccgaaggtcttaatgacaaccttcttgaaatactccaaaaagagaaagtcaacatcaatattgttggtgactttaaacttaatgaagagatcgccattattttggcatctttttctgcttccacaagtgcttttgtggaaactgtgaaaggtttggattataaagcattcaaacaaattgttgaatcctgtggtaattttaaagttacaaaaggaaaagctaaaaaaggtgcctggaatattggtgaacagaaatcaatactgagtcctctttatgcatttgcatcagaggctgctcgtgttgtacgatcaattttctcccgcactcttgaaactgctcaaaattctgtgcgtgttttacagaaggccgctataacaatactagatggaatttcacagtattcactgagactcattgatgctatgatgttcacatctgatttggctactaacaatctagttgtaatggcctacattacaggtggtgttgttcagttgacttcgcagtggctaactaacatctttggcactgtttatgaaaaactcaaacccgtccttgattggcttgaagagaagtttaaggaaggtgtagagtttcttagagacggttgggaaattgttaaatttatctcaacctgtgcttgtgaaattgtcggtggacaaattgtcacctgtgcaaaggaaattaaggagagtgttcagacattctttaagcttgtaaataaatttttggctttgtgtgctgactctatcattattggtggagctaaacttaaagccttgaatttaggtgaaacatttgtcacgcactcaaagggattgtacagaaagtgtgttaaatccagagaagaaactggcctactcatgcctctaaaagccccaaaagaaattatcttcttagagggagaaacacttcccacagaagtgttaacagaggaagttgtcttgaaaactggtgatttacaaccattagaacaacctactagtgaagctgttgaagctccattggttggtacaccagtttgtattaacgggcttatgttgctcgaaatcaaagacacagaaaagtactgtgcccttgcacctaatatgatggtaacaaacaataccttcacactcaaaggcggtgcaccaacaaaggttacttttggtgatgacactgtgatagaagtgcaaggttacaagagtgtgaatatcacttttgaacttgatgaaaggattgataaagtacttaatgagaagtgctctgcctatacagttgaactcggtacagaagtaaatgagttcgcctgtgttgtggcagatgctgtcataaaaactttgcaaccagtatctgaattacttacaccactgggcattgatttagatgagtggagtatggctacatactacttatttgatgagtctggtgagtttaaattggcttcacatatgtattgttctttctaccctccagatgaggatgaagaagaaggtgattgtgaagaagaagagtttgagccatcaactcaatatgagtatggtactgaagatgattaccaaggtaaacctttggaatttggtgccacttctgctgctcttcaacctgaagaagagcaagaagaagattggttagatgatgatagtcaacaaactgttggtcaacaagacggcagtgaggacaatcagacaactactattcaaacaattgttgaggttcaacctcaattagagatggaacttacaccagttgttcagactattgaagtgaatagttttagtggttatttaaaacttactgacaatgtatacattaaaaatgcagacattgtggaagaagctaaaaaggtaaaaccaacagtggttgttaatgcagccaatgtttaccttaaacatggaggaggtgttgcaggagccttaaataaggctactaacaatgccatgcaagttgaatctgatgattacatagctactaatggaccacttaaagtgggtggtagttgtgttttaagcggacacaatcttgctaaacactgtcttcatgttgtcggcccaaatgttaacaaaggtgaagacattcaacttcttaagagtgcttatgaaaattttaatcagcacgaagttctacttgcaccattattatcagctggtatttttggtgctgaccctatacattctttaagagtttgtgtagatactgttcgcacaaatgtctacttagctgtctttgataaaaatctctatgacaaacttgtttcaagctttttggaaatgaagagtgaaaagcaagttgaacaaaagatcgctgagattcctaaagaggaagttaagccatttataactgaaagtaaaccttcagttgaacagagaaaacaagatgataagaaaatcaaagcttgtgttgaagaagttacaacaactctggaagaaactaagttcctcacagaaaacttgttactttatattgacattaatggcaatcttcatccagattctgccactcttgttagtgacattgacatcactttcttaaagaaagatgctccatatatagtgggtgatgttgttcaagagggtgttttaactgctgtggttatacctactaaaaaggctggtggcactactgaaatgctagcgaaagctttgagaaaagtgccaacagacaattatataaccacttacccgggtcagggtttaaatggttacactgtagaggaggcaaagacagtgcttaaaaagtgtaaaagtgccttttacattctaccatctattatctctaatgagaagcaagaaattcttggaactgtttcttggaatttgcgagaaatgcttgcacatgcagaagaaacacgcaaattaatgcctgtctgtgtggaaactaaagccatagtttcaactatacagcgtaaatataagggtattaaaatacaagagggtgtggttgattatggtgctagattttacttttacaccagtaaaacaactgtagcgtcacttatcaacacacttaacgatctaaatgaaactcttgttacaatgccacttggctatgtaacacatggcttaaatttggaagaagctgctcggtatatgagatctctcaaagtgccagctacagtttctgtttcttcacctgatgctgttacagcgtataatggttatcttacttcttcttctaaaacacctgaagaacattttattgaaaccatctcacttgctggttcctataaagattggtcctattctggacaatctacacaactaggtatagaatttcttaagagaggtgataaaagtgtatattacactagtaatcctaccacattccacctagatggtgaagttatcacctttgacaatcttaagacacttctttctttgagagaagtgaggactattaaggtgtttacaacagtagacaacattaacctccacacgcaagttgtggacatgtcaatgacatatggacaacagtttggtccaacttatttggatggagctgatgttactaaaataaaacctcataattcacatgaaggtaaaacattttatgttttacctaatgatgacactctacgtgttgaggcttttgagtactaccacacaactgatcctagttttctgggtaggtacatgtcagcattaaatcacactaaaaagtggaaatacccacaagttaatggtttaacttctattaaatgggcagataacaactgttatcttgccactgcattgttaacactccaacaaatagagttgaagtttaatccacctgctctacaagatgcttattacagagcaagggctggtgaagctgctaacttttgtgcacttatcttagcctactgtaataagacagtaggtgagttaggtgatgttagagaaacaatgagttacttgtttcaacatgccaatttagattcttgcaaaagagtcttgaacgtggtgtgtaaaacttgtggacaacagcagacaacccttaagggtgtagaagctgttatgtacatgggcacactttcttatgaacaatttaagaaaggtgttcagataccttgtacgtgtggtaaacaagctacaaaatatctagtacaacaggagtcaccttttgttatgatgtcagcaccacctgctcagtatgaacttaagcatggtacatttacttgtgctagtgagtacactggtaattaccagtgtggtcactataaacatataacttctaaagaaactttgtattgcatagacggtgctttacttacaaagtcctcagaatacaaaggtcctattacggatgttttctacaaagaaaacagttacacaacaaccataaaaccagttacttataaattggatggtgttgtttgtacagaaattgaccctaagttggacaattattataagaaagacaattcttatttcacagagcaaccaattgatcttgtaccaaaccaaccatatccaaacgcaagcttcgataattttaagtttgtatgtgataatatcaaatttgctgatgatttaaaccagttaactggttataagaaacctgcttcaagagagcttaaagttacatttttccctgacttaaatggtgatgtggtggctattgattataaacactacacaccctcttttaagaaaggagctaaattgttacataaacctattgtttggcatgttaacaatgcaactaataaagccacgtataaaccaaatacctggtgtatacgttgtctttggagcacaaaaccagttgaaacatcaaattcgtttgatgtactgaagtcagaggacgcgcagggaatggataatcttgcctgcgaagatctaaaaccagtctctgaagaagtagtggaaaatcctaccatacagaaagacgttcttgagtgtaatgtgaaaactaccgaagttgtaggagacattatacttaaaccagcaaataatagtttaaaaattacagaagaggttggccacacagatctaatggctgcttatgtagacaattctagtcttactattaagaaacctaatgaattatctagagtattaggtttgaaaacccttgctactcatggtttagctgctgttaatagtgtcccttgggatactatagctaattatgctaagccttttcttaacaaagttgttagtacaactactaacatagttacacggtgtttaaaccgtgtttgtactaattatatgccttatttctttactttattgctacaattgtgtacttttactagaagtacaaattctagaattaaagcatctatgccgactactatagcaaagaatactgttaagagtgtcggtaaattttgtctagaggcttcatttaattatttgaagtcacctaatttttctaaactgataaatattataatttggtttttactattaagtgtttgcctaggttctttaatatactcaacggcggcgttaggtgttttaatgtctaatttaggcatgccgtcttactgtacgggttacagagaaggctatttgaactctacgaatgtcacgatagcgacgtactgtacgggttctataccgtgtagtgtttgtcttagtggtttagattctttagacacgtatccgtctttagaaacgatacaaataacgatatcatcttttaaatgggatttaacggcgtttggcttagttgcggagtggtttttggcgtatattcttttcacgaggtttttctatgtacttggattggcggcgataatgcaattgtttttcagctattttgcggtacattttataagtaattcttggcttatgtggttaataataaatcttgtacaaatggcgccgatatcagcgatggttagaatgtacatattctttgcgtcattttattatgtatggaaaagttatgtgcatgttgtagacggttgtaattcatcaacgtgtatgatgtgttacaaacgtaatagagcgacgagagtcgaatgtacgacgatagttaatggtgttagaaggtccttttatgtctatgcgaatggaggtaaaggcttttgcaaactacacaattggaattgtgttaattgtgatacgttctgtgcgggtagtacgtttataagtgatgaagttgcgagagacttgtcactacagtttaaaagaccgataaatccgacggaccagtcttcttacatagttgatagtgttacggtgaagaatggttccatacatctttactttgataaagcgggtcaaaagacgtatgaaagacattctctctctcattttgttaacttagacaacctgagagcgaataacacgaaaggttcattgccgataaatgttatagtttttgatggtaaatcaaaatgtgaagaatcatctgcgaaatcagcgtctgtttactacagtcagcttatgtgtcaaccgatactgttactagatcaggcgttagtgtctgatgttggtgatagtgcggaagttgcggttaaaatgtttgatgcgtacgttaatacgttttcatcaacgtttaacgtaccgatggaaaaactcaaaacgctagttgcgacggcggaagcggaacttgcgaagaatgtgtccttagacaatgtcttatctacgtttatatcagcggcgcggcaagggtttgttgattcagatgtagaaacgaaagatgttgttgaatgtcttaaattgtcacatcaatctgacatagaagttacgggcgatagttgtaataactatatgctcacgtataacaaagttgaaaacatgacgccgcgtgaccttggtgcgtgtatagactgtagtgcgcgtcatataaatgcgcaggtagcgaaaagtcacaacatagcgttgatatggaacgttaaagatttcatgtcattgtctgaacaactacgaaaacaaatacgtagtgcggcgaaaaagaataacttaccgtttaagttgacgtgtgcgacgacgagacaagttgttaatgttgtaacgacgaagatagcgcttaagggtggtaaaatagttaataattggttgaagcagttaattaaagttacacttgtgttcctttttgttgctgctattttctatttaataacacctgttcatgtcatgtctaaacatactgacttttcaagtgaaatcataggatacaaggctattgatggtggtgtcactcgtgacatagcatctacagatacttgttttgctaacaaacatgctgattttgacacatggtttagccagcgtggtggtagttatactaatgacaaagcttgcccattgattgctgcagtcataacaagagaagtgggttttgtcgtgcctggtttgcctggcacgatattacgcacaactaatggtgactttttgcatttcttacctagagtttttagtgcagttggtaacatctgttacacaccatcaaaacttatagagtacactgactttgcaacatcagcttgtgttttggctgctgaatgtacaatttttaaagatgcttctggtaagccagtaccatattgttatgataccaatgtactagaaggttctgttgcttatgaaagtttacgccctgacacacgttatgtgctcatggatggctctattattcaatttcctaacacctaccttgaaggttctgttagagtggtaacaacttttgattctgagtactgtaggcacggcacttgtgaaagatcagaagctggtgtttgtgtatctactagtggtagatgggtacttaacaatgattattacagatctttaccaggagttttctgtggtgtagatgctgtaaatttacttactaatatgtttacaccactaattcaacctattggtgctttggacatatcagcatctatagtagctggtggtattgtagctatcgtagtaacatgccttgcctactattttatgaggtttagaagagcttttggtgaatacagtcatgtagttgcctttaatactttactattccttatgtcattcactgtactctgtttaacaccagtttactcattcttacctggtgtttattctgttatttacttgtacttgacattttatcttactaatgatgtttcttttttagcacatattcagtggatggttatgttcacacctttagtacctttctggataacaattgcttatatcatttgtatttccacaaagcatttctattggttctttagtaattacctaaagagacgtgtagtctttaatggtgtttcctttagtacttttgaagaagctgcgctgtgcacctttttgttaaataaagaaatgtatctaaagttgcgtagtgatgtgctattacctcttacgcaatataatagatacttagctctttataataagtacaagtattttagtggagcaatggatacaactagctacagagaagctgcttgttgtcatctcgcaaaggctctcaatgacttcagtaactcaggttctgatgttctttaccaaccaccacaaacctctatcacctcagctgttttgcagagtggttttagaaaaatggcattcccatctggtaaagttgagggttgtatggtacaagtaacttgtggtacaactacacttaacggtctttggcttgatgacgtagtttactgtccaagacatgtgatctgcacctctgaagacatgcttaaccctaattatgaagatttactcattcgtaagtctaatcataatttcttggtacaggctggtaatgttcaactcagggttattggacattctatgcaaaattgtgtacttaagcttaaggttgatacagccaatcctaagacacctaagtataagtttgttcgcattcaaccaggacagactttttcagtgttagcttgttacaatggttcaccatctggtgtttaccaatgtgctatgaggcccaatttcactattaagggttcattccttaatggttcatgtggtagtgttggttttaacatagattatgactgtgtctctttttgttacatgcaccatatggaattaccaactggagttcatgctggcacagacttagaaggtaacttttatggaccttttgttgacaggcaaacagcacaagcagctggtacggacacaactattacagttaatgttttagcttggttgtacgctgctgttataaatggagacaggtggtttctcaatcgatttaccacaactcttaatgactttaaccttgtggctatgaagtacaattatgaacctctaacacaagaccatgttgacatactaggacctctttctgctcaaactggaattgccgttttagatatgtgtgcttcattaaaagaattactgcaaaatggtatgaatggacgtaccatattgggtagtgctttattagaagatgaatttacaccttttgatgttgttagacaatgctcaggtgttactttccaaagtgcagtgaaaagaacaatcaagggtacacaccactggttgttactcacaattttgacttcacttttagttttagtccagagtactcaatggtctttgttcttttttttgtatgaaaatgcctttttaccttttgctatgggtattattgctatgtctgcttttgcaatgatgtttgtcaaacataagcatgcatttctctgtttgtttttgttaccttctcttgccactgtagcttattttaatatggtctatatgcctgctagttgggtgatgcgtattatgacatggttggatatggttgatactagtttgtctggttttaagctaaaagactgtgttatgtatgcatcagctgtagtgttactaatccttatgacagcaagaactgtgtatgatgatggtgctaggagagtgtggacacttatgaatgtcttgacactcgtttataaagtttattatggtaatgctttagatcaagccatttccatgtgggctcttataatctctgttacttctaactactcaggtgtagttacaactgtcatgtttttggccagaggtattgtttttatgtgtgttgagtattgccctattttcttcataactggtaatacacttcagtgtataatgctagtttattgtttcttaggctatttttgtacttgttactttggcctcttttgtttactcaaccgctactttagactgactcttggtgtttatgattacttagtttctacacaggagtttagatatatgaattcacagggactactcccacccaagaatagcatagatgccttcaaactcaacattaaattgttgggtgttggtggcaaaccttgtatcaaagtagccactgtacagtctaaaatgtcagatgtaaagtgcacatcagtagtcttactctcagttttgcaacaactcagagtagaatcatcatctaaattgtgggctcaatgtgtccagttacacaatgacattctcttagctaaagatactactgaagcctttgaaaaaatggtttcactactttctgttttgctttccatgcagggtgctgtagacataaacaagctttgtgaagaaatgctggacaacagggcaaccttacaagctatagcctcagagtttagttcccttccatcatatgcagcttttgctactgctcaagaagcttatgagcaggctgttgctaatggtgattctgaagttgttcttaaaaagttgaagaagtctttgaatgtggctaaatctgaatttgaccgtgatgcagccatgcaacgtaagttggaaaagatggctgatcaagctatgacccaaatgtataaacaggctagatctgaggacaagagggcaaaagttactagtgctatgcagacaatgcttttcactatgcttagaaagttggataatgatgcactcaacaacattatcaacaatgcaagagatggttgtgttcccttgaacataatacctcttacaacagcagccaaactaatggttgtcataccagactataacacatataaaaatacgtgtgatggtacaacatttacttatgcatcagcattgtgggaaatccaacaggttgtagatgcagatagtaaaattgttcaacttagtgaaattagtatggacaattcacctaatttagcatggcctcttattgtaacagctttaagggccaattctgctgtcaaattacagaataatgagcttagtcctgttgcactacgacagatgtcttgtgctgccggtactacacaaactgcttgcactgatgacaatgcgttagcttactacaacacaacaaagggaggtaggtttgtacttgcactgttatccgatttacaggatttgaaatgggctagattccctaagagtgatggaactggtactatctatacagaactggaaccaccttgtaggtttgttacagacacacctaaaggtcctaaagtgaagtatttatactttattaaaggattaaacaacctaaatagaggtatggtacttggtagtttagctgccacagtacgtctacaagctggtaatgcaacagaagtgcctgccaattcaactgtattatctttctgtgcttttgctgtagatgctgctaaagcttacaaagattatctagctagtgggggacaaccaatcactaattgtgttaagatgttgtgtacacacactggtactggtcaggcaataacagttacaccggaagccaatatggatcaagaatcctttggtggtgcatcgtgttgtctgtactgccgttgccacatagatcatccaaatcctaaaggattttgtgacttaaaaggtaagtatgtacaaatacctacaacttgtgctaatgaccctgtgggttttacacttaaaaacacagtctgtaccgtctgcggtatgtggaaaggttatggctgtagttgtgatcaactccgcgaacccatgcttcagtcagctgatgcacaatcgtttttaaacgggtttgcggtgtaagtgcagcccgtcttacaccgtgcggcacaggcactagtactgatgtcgtatacagggcttttgacatctacaatgataaagtagctggttttgctaaattcctaaaaactaattgttgtcgcttccaagaaaaggacgaagatgacaatttaattgattcttactttgtagttaagagacacactttctctaactaccaacatgaagaaacaatttataatttacttaaggattgtccagctgttgctaaacatgacttctttaagtttagaatagacggtgacatggtaccacatatatcacgtcaacgtcttactaaatacacaatggcagacctcgtctatgctttaaggcattttgatgaaggtaattgtgacacattaaaagaaatacttgtcacatacaattgttgtgatgatgattatttcaataaaaaggactggtatgattttgtagaaaacccagatatattacgcgtatacgccaacttaggtgaacgtgtacgccaagctttgttaaaaacagtacaattctgtgatgccatgcgaaatgctggtattgttggtgtactgacattagataatcaagatctcaatggtaactggtatgatttcggtgatttcatacaaaccacgccaggtagtggagttcctgttgtagattcttattattcattgttaatgcctatattaaccttgaccagggctttaactgcagagtcacatgttgacactgacttaacaaagccttacattaagtgggatttgttaaaatatgacttcacggaagagaggttaaaactctttgaccgttattttaaatattgggatcagacataccacccaaattgtgttaactgtttggatgacagatgcattctgcattgtgcaaactttaatgttttattctctacagtgttcccacctacaagttttggaccactagtgagaaaaatatttgttgatggtgttccatttgtagtttcaactggataccacttcagagagctaggtgttgtacataatcaggatgtaaacttacatagctctagacttagttttaaggaattacttgtgtatgctgctgaccctgctatgcacgctgcttctggtaatctattactagataaacgcactacgtgcttttcagtagctgcacttactaacaatgttgcttttcaaactgtcaaacccggtaattttaacaaagacttctatgactttgctgtgtctaagggtttctttaaggaaggaagttctgttgaattaaaacacttcttctttgctcaggatggtaatgctgctatcagcgattatgactactatcgttataatctaccaacaatgtgtgatatcagacaactactatttgtagttgaagttgttgataagtactttgattgttacgatggtggctgtattaatgctaaccaagtcatcgtcaacaacctagacaaatcagctggttttccatttaataaatggggtaaggctagactttattatgattcaatgagttatgaggatcaagatgcacttttcgcatatacaaaacgtaatgtcatccctactataactcaaatgaatcttaagtatgccattagtgcaaagaatagagctcgcaccgtagctggtgtctctatctgtagtactatgaccaatagacagtttcatcaaaaattattgaaatcaatagccgccactagaggagctactgtagtaattggaacaagcaaattctatggtggttggcacaacatgttaaaaactgtttatagtgatgtagaaaaccctcaccttatgggttgggattatcctaaatgtgatagagccatgcctaacatgcttagaattatggcctcacttgttcttgctcgcaaacatacaacgtgttgtagcttgtcacaccgtttctatagattagctaatgagtgtgctcaagtattgagtgaaatggtcatgtgtggcggttcactatatgttaaaccaggtggaacctcatcaggagatgccacaactgcttatgctaatagtgtttttaacatttgtcaagctgtcacggccaatgttaatgcacttttatctactgatggtaacaaaattgccgataagtatgtccgcaatttacaacacagactttatgagtgtctctatagaaatagagatgttgacacagactttgtgaatgagttttacgcatatttgcgtaaacatttctcaatgatgatactctctgacgatgctgttgtgtgtttcaatagcacttatgcatctcaaggtctagtggctagcataaagaactttaagtcagttctttattatcaaaacaatgtttttatgtctgaagcaaaatgttggactgagactgaccttactaaaggacctcatgaattttgctctcaacatacaatgctagttaaacagggtgatgattatgtgtaccttccttacccagatccatcaagaatcctaggggccggctgttttgtagatgatatcgtaaaaacagatggtacacttatgattgaacggttcgtgtctttagctatagatgcttacccacttactaaacatcctaatcaggagtatgctgatgtctttcatttgtacttacaatacataagaaagctacatgatgagttaacaggacacatgttagacatgtattctgttatgcttactaatgataacacttcaaggtattgggaacctgagttttatgaggctatgtacacaccgcatacagtcttacaggctgttggggcttgtgttctttgcaattcacagacttcattaagatgtggtgcttgcatacgtagaccattcttatgttgtaaatgctgttacgaccatgtcatatcaacatcacataaattagtcttgtctgttaatccgtatgtttgcaatgctccaggttgtgatgtcacagatgtgactcaactttacttaggaggtatgagctattattgtaaatcacataaaccacccattagttttccattgtgtgctaatggacaagtttttggtttatataaaaatacatgtgttggtagcgataatgttactgactttaatgcaattgcaacatgtgactggacaaatgctggtgattacattttagctaacacctgtactgaaagactcaagctttttgcagcagaaacgctcaaagctactgaggagacatttaaactgtcttatggtattgctactgtacgtgaagtgctgtctgacagagaattacatctttcatgggaagttggtaaacctagaccaccacttaaccgaaattatgtctttactggttatcgtgtaactaaaaacagtaaagtacaaataggagagtacacctttgaaaaaggtgactatggtgatgctgttgtttaccgaggtacaacaacttacaaattaaatgttggtgattattttgtgctgacatcacatacagtaatgccattaagtgcacctacactagtgccacaagagcactatgttagaattactggcttatacccaacactcaatatctcagatgagttttctagcaatgttgcaaattatcaaaaggttggtatgcaaaagtattctacactccagggaccacctggtactggtaagagtcattttgctattggcctagctctctactacccttctgctcgcatagtgtatacagcttgctctcatgccgctgttgatgcactatgtgagaaggcattaaaatatttgcctatagataaatgtagtagaattatacctgcacgtgctcgtgtagagtgttttgataaattcaaagtgaattcaacattagaacagtatgtcttttgtactgtaaatgcattgcctgagacgacagcagatatagttgtctttgatgaaatttcaatggccacaaattatgatttgagtgttgtcaatgccagattacgtgctaagcactatgtgtacattggcgaccctgctcaattacctgcaccacgcacattgctaactaagggcacactagaaccagaatatttcaattcagtgtgtagacttatgaaaactataggtccagacatgttcctcggaacttgtcggcgttgtcctgctgaaattgttgacactgtgagtgctttggtttatgataataagcttaaagcacataaagacaaatcagctcaatgctttaaaatgttttataagggtgttatcacgcatgatgtttcatctgcaattaacaggccacaaataggcgtggtaagagaattccttacacgtaaccctgcttggagaaaagctgtctttatttcaccttataattcacagaatgctgtagcctcaaagattttgggactaccaactcaaactgttgattcatcacagggctcagaatatgactatgtcatattcactcaaaccactgaaacagctcactcttgtaatgtaaacagatttaatgttgctattaccagagcaaaagtaggcatactttgcataatgtctgatagagacctttatgacaagttgcaatttacaagtcttgaaattccacgtaggaatgtggcaactttacaagctgaaaatgtaacaggactctttaaagattgtagtaaggtaatcactgggttacatcctacacaggcacctacacacctcagtgttgacactaaattcaaaactgaaggtttatgtgttgacatacctggcatacctaaggacatgacctatagaagactcatctctatgatgggttttaaaatgaattatcaagttaatggttaccctaacatgtttatcacccgcgaagaagctataagacatgtacgtgcatggattggcttcgatgtcgaggggtgtcatgctactagagaagctgttggtaccaatttacctttacagctaggtttttctacaggtgttaacctagttgctgtacctacaggttatgttgatacacctaataatacagatttttccagagttagtgctaaaccaccgcctggagatcaatttaaacacctcataccacttatgtacaaaggacttccttggaatgtagtgcgtataaagattgtacaaatgttaagtgacacacttaaaaatctctctgacagagtcgtatttgtcttatgggcacatggctttgagttgacatctatgaagtattttgtgaaaataggacctgagcgcacctgttgtctatgtgatagacgtgccacatgcttttccactgcttcagacacttatgcctgttggcatcattctattggatttgattacgtctataatccgtttatgattgatgttcaacaatggggttttacaggtaacctacaaagcaaccatgatctgtattgtcaagtccatggtaatgcacatgtagctagttgtgatgcaatcatgactaggtgtctagctgtccacgagtgctttgttaagcgtgttgactggactattgaatatcctataattggtgatgaactgaagattaatgcggcttgtagaaaggttcaacacatggttgttaaagctgcattattagcagacaaattcccagttcttcacgacattggtaaccctaaagctattaagtgtgtacctcaagctgatgtagaatggaagttctatgatgcacagccttgtagtgacaaagcttataaaatagaagaattattctattcttatgccacacattctgacaaattcacagatggtgtatgcctattttggaattgcaatgtcgatagatatcctgctaattccattgtttgtagatttgacactagagtgctatctaaccttaacttgcctggttgtgatggtggcagtttgtatgtaaataaacatgcattccacacaccagcttttgataaaagtgcttttgttaatttaaaacaattaccatttttctattactctgacagtccatgtgagtctcatggaaaacaagtagtgtcagatatagattatgtaccactaaagtctgctacgtgtataacacgttgcaatttaggtggtgctgtctgtagacatcatgctaatgagtacagattgtatctcgatgcttataacatgatgatctcagctggctttagcttgtgggtttacaaacaatttgatacttataacctctggaacacttttacaagacttcagagtttagaaaatgtggcttttaatgttgtaaataagggacactttgatggacaacagggtgaagtaccagtttctatcattaataacactgtttacacaaaagttgatggtgttgatgtagaattgtttgaaaataaaacaacattacctgttaatgtagcatttgagctttgggctaagcgcaacattaaaccagtaccagaggtgaaaatactcaataatttgggtgtggacattgctgctaatactgtgatctgggactacaaaagagatgctccagcacatatatctactattggtgtttgttctatgactgacatagccaagaaaccaactgaaacgatttgtgcaccactcactgtcttttttgatggtagagttgatggtcaagtagacttatttagaaatgcccgtaatggtgttcttattacagaaggtagtgttaaaggtttacaaccatctgtaggtcccaaacaagctagtcttaatggagtcacattaattggagaagccgtaaaaacacagttcaattattataagaaagttgatggtgttgtccaacaattacctgaaacttactttactcagagtagaaatttacaagaatttaaacccaggagtcaaatggaaattgatttcttagaattagctatggatgaattcattgaacggtataaattagaaggctatgccttcgaacatatcgtttatggagattttagtcatagtcagttaggtggtttacatctactgattggactagctaaacgttttaaggaatcaccttttgaattagaagattttattcctatggacagtacagttaaaaactatttcataacagatgcgcaaacaggttcatctaagtgtgtgtgttctgttattgatttattacttgatgattttgttgaaataataaaatcccaagatttatctgtagtttctaaggttgtcaaagtgactattgactatacagaaatttcatttatgctttggtgtaaagatggccatgtagaaacattttacccaaaattacaatctagtcaagcgtggcaaccgggtgttgctatgcctaatctttacaaaatgcaaagaatgctattagaaaagtgtgaccttcaaaattatggtgatagtgcaacattacctaaaggcataatgatgaatgtcgcaaaatatactcaactgtgtcaatatttaaacacattaacattagctgtaccctataatatgagagttatacattttggtgctggttctgataaaggagttgcaccaggtacagctgttttaagacagtggttgcctacgggtacgctgcttgtcgattcagatcttaatgactttgtctctgatgcagattcaactttgattggtgattgtgcaactgtacatacagctaataaatgggatctcattattagtgatatgtacgaccctaagactaaaaatgttacaaaagaaaatgactctaaagagggttttttcacttacatttgtgggtttatacaacaaaagctagctcttggaggttccgtggctataaagataacagaacattcttggaatgctgatctttataagctcatgggacacttcgcatggtggacagcctttgttactaatgtgaatgcgtcatcatctgaagcatttttaattggatgtaattatcttggcaaaccacgcgaacaaatagatggttatgtcatgcatgcaaattacatattttggaggaatacaaatccaattcagttgtcttcctattctttatttgacatgagtaaatttccccttaaattaaggggtactgctgttatgtctttaaaagaaggtcaaatcaatgatatgattttatctcttcttagtaaaggtagacttataattagagaaaacaacagagttgttatttctagtgatgttcttgttaacaactaaacgaacaatgtttgtttttcttgttttattgccactagtctctagtcagtgtgttaatcttacaaccagaactcaattaccccctgcatacactaattctttcacacgtggtgtttattaccctgacaaagttttcagatcctcagttttacattcaactcaggacttgttcttacctttcttttccaatgttacttggttccatgctatacatgtctctgggaccaatggtactaagaggtttgataaccctgtcctaccatttaatgatggtgtttattttgcttccattgagaagtctaacataataagaggctggatttttggtactactttagactcgaagacccagtccctacttattgttaataacgctactaatgttgttattaaagtctgtgaatttcaattttgtaatgatccatttttggatgtttattaccacaaaaacaacaaaagttggatgaaaagtgagttcagagtttattctagtgcgaataattgcacttttgaatatgtctctcagccttttcttatggaccttgaaggaaaacagggtaatttcaaaaatcttagggaatttgtgtttaagaatattgatggttattttaaaatatattctaagcacacgcctattaatttagtgcgtgatctccctcagggtttttcggctttagaaccattggtagatttgccaataggtattaacatcactaggtttcaaactttacttgctttacatagaagttatttgactcctggtgattcttcttcaggttggacagctggtgctgcagcttattatgtgggttatcttcaacctaggacttttctattaaaatataatgaaaatggaaccattacagatgctgtagactgtgcacttgaccctctctcagaaacaaagtgtacgttgaaatccttcactgtagaaaaaggaatctatcaaacttctaactttagagtccaaccaacagaatctattgttagatttcctaatattacaaacttgtgcccttttggtgaagtttttaacgccaccagatttgcatctgtttatgcttggaacaggaagagaatcagcaactgtgttgctgattattctgtcctatataattccgcatcattttccacttttaagtgttatggagtgtctcctactaaattaaatgatctctgctttactaatgtctatgcagattcatttgtaattagaggtgatgaagtcagacaaatcgctccagggcaaactggaaagattgctgattataattataaattaccagatgattttacaggctgcgttatagcttggaattctaacaatcttgattctaaggttggtggtaattataattaccggtatagattgtttaggaagtctaatctcaaaccttttgagagagatatttcaactgaaatctatcaggccggtagcacaccttgtaatggtgttcaaggttttaattgttactttcctttacaatcatatggtttccaacccactaatggtgttggttaccaaccatacagagtagtagtactttcttttgaacttctacatgcaccagcaactgtttgtggacctaaaaagtctactaatttggttaaaaacaaatgtgtcaatttcaacttcaatggtttaacaggcacaggtgttcttactgagtctaacaaaaagtttctgcctttccaacaatttggcagagacattgctgacactactgatgctgtccgtgatccacagacacttgagattcttgacattacaccatgttcttttggtggtgtcagtgttataacaccaggaacaaatacttctaaccaggttgctgttctttatcagggtgttaactgcacagaagtccctgttgctattcatgcagatcaacttactcctacttggcgtgtttattctacaggttctaatgtttttcaaacacgtgcaggctgtttaataggggctgaacatgtcaacaactcatatgagtgtgacatacccattggtgcaggtatatgcgctagttatcagactcagactaattctcgtcggcgggcacgtagtgtagctagtcaatccatcattgcctacactatgtcacttggtgcagaaaattcagttgcttactctaataactctattgccatacccacaaattttactattagtgttaccacagaaattctaccagtgtctatgaccaagacatcagtagattgtacaatgtacatttgtggtgattcaactgaatgcagcaatcttttgttgcaatatggcagtttttgtacacaattaaaccgtgctttaactggaatagctgttgaacaagacaaaaacacccaagaagtttttgcacaagtcaaacaaatttacaaaacaccaccaattaaagattttggtggttttaatttttcacaaatattaccagatccatcaaaaccaagcaagaggtcatttattgaagatctacttttcaacaaagtgacacttgcagatgctggcttcatcaaacaatatggtgattgccttggtgatattgctgctagagacctcatttgtgcacaaaagtttaacggccttactgttttgccacctttgctcacagatgaaatgattgctcaatacacttctgcactgttagcgggtacaatcacttctggttggacctttggtgcaggtgctgcattacaaataccatttgctatgcaaatggcttataggtttaatggtattggagttacacagaatgttctctatgagaaccaaaaattgattgccaaccaatttaatagtgctattggcaaaattcaagactcactttcttccacagcaagtgcacttggaaaacttcaagatgtggtcaaccaaaatgcacaagctttaaacacgcttgttaaacaacttagctccaattttggtgcaatttcaagtgttttaaatgatatcctttcacgtcttgacaaagttgaggctgaagtgcaaattgataggttgatcacaggcagacttcaaagtttgcagacatatgtgactcaacaattaattagagctgcagaaatcagagcttctgctaatcttgctgctactaaaatgtcagagtgtgtacttggacaatcaaaaagagttgatttttgtggaaagggctatcatcttatgtccttccctcagtcagcacctcatggtgtagtcttcttgcatgtgacttatgtccctgcacaagaaaagaacttcacaactgctcctgccatttgtcatgatggaaaagcacactttcctcgtgaaggtgtctttgtttcaaatggcacacactggtttgtaacacaaaggaatttttatgaaccacaaatcattactacagacaacacatttgtgtctggtaactgtgatgttgtaataggaattgtcaacaacacagtttatgatcctttgcaacctgaattagactcattcaaggaggagttagataaatattttaagaatcatacatcaccagatgttgatttaggtgacatctctggcattaatgcttcagttgtaaacattcaaaaagaaattgaccgcctcaatgaggttgccaagaatttaaatgaatctctcatcgatctccaagaacttggaaagtatgagcagtatataaaatggccatggtacatttggctaggttttatagctggcttgattgccatagtaatggtgacaattatgctttgctgtatgaccagttgctgtagttgtctcaagggctgttgttcttgtggatcctgctgcaaatttgatgaagacgactctgagccagtgctcaaaggagtcaaattacattacacataaacgaacttatggatttgtttatgagaatcttcacaattggaactgtaactttgaagcaaggtgaaatcaaggatgctactccttcagattttgttcgcgctactgcaacgataccgatacaagcctcactccctttcggatggcttattgttggcgttgcacttcttgctgtttttcagagcgcttccaaaatcataaccctcaaaaagagatggcaactagcactctccaagggtgttcactttgtttgcaacttgctgttgttgtttgtaacagtttactcacaccttttgctcgttgctgctggccttgaagccccttttctctatctttatgctttagtctacttcttgcagagtataaactttgtaagaataataatgaggctttggctttgctggaaatgccgttccaaaaacccattactttatgatgccaactattttctttgctggcatactaattgttacgactattgtataccttacaatagtgtaacttcttcaattgtcattacttcaggtgatggcacaacaagtcctatttctgaacatgactaccagattggtggttatactgaaaaatgggaatctggagtaaaagactgtgttgtattacacagttacttcacttcagactattaccagctgtactcaactcaattgagtacagacactggtgttgaacatgttaccttcttcatctacaataaaattgttgatgagcctgaagaacatgtccaaattcacacaatcgacggttcatccggagttgttaatccagtaatggaaccaatttatgatgaaccgacgacgactactagcgtgcctttgtaagcacaagctgatgagtacgaacttatgtactcattcgtttcggaagagacaggtacgttaatagttaatagcgtacttctttttcttgctttcgtggtattcttgctagttacactagccatccttactgcgcttcgattgtgtgcgtactgctgcaatattgttaacgtgagtcttgtaaaaccttctttttacgtttactctcgtgttaaaaatctgaattcttctagagttcctgatcttctggtctaaacgaactaaatattatattagtttttctgtttggaactttaattttagccatggcagattccaacggtactattaccgttgaagagcttaaaaagctccttgaacaatggaacctagtaataggtttcctattccttacatggatttgtcttctacaatttgcctatgccaacaggaataggtttttgtatataattaagttaattttcctctggctgttatggccagtaactttagcttgttttgtgcttgctgctgtttacagaataaattggatcaccggtggaattgctatcgcaatggcttgtcttgtaggcttgatgtggctcagctacttcattgcttctttcagactgtttgcgcgtacgcgatccatgtggtcattcaatccagaaactaacattcttctcaacgtgccactccatggcactattctgaccagaccgcttctagaaagtgaactcgtaatcggagctgtgatccttcgtggacatcttcgtattgctggacaccatctaggacgctgtgacatcaaggacctgcctaaagaaatcactgttgctacatcacgaacgctttcttattacaaattgggagcttcgcagcgtgtagcaggtgactcaggttttgctgcatacagtcgctacaggattggcaactataaattaaacacagaccattccagtagcagtgacaatattgctttgcttgtacagtaagtgacaacagatgtttcatctcgttgactttcaggttactatagcagagatattactaattattatgaggacttttaaagtttccatttggaatcttgattacatcataaacctcataattaaaaatttatctaagtcactaactgagaataaatattctcaattagatgaagagcaaccaatggagattgattaaacgaacatgaaaattattcttttcttggcactgataacactcgctacttgtgagctttatcactaccaagagtgtgttagaggtacaacagtacttttaaaagaaccttgctcttctggaacatacgagggcaattcaccatttcatcctctagctgataacaaatttgcactgacttgctttagcactcaatttgcttttgcttgtcctgacggcgtaaaacacgtctatcagttacgtgccagatcagtttcacctaaactgttcatcagacaagaggaagttcaagaactttactctccaatttttcttattgttgcggcaatagtgtttataacactttgcttcacactcaaaagaaagacagaatgattgaactttcattaattgacttctatttgtgctttttagcctttctgctattccttgttttaattatgcttattatcttttggttctcacttgaactgcaagatcataatgaaacttgtcacgcctaaacgaacatgaaatttcttgttttcttaggaatcatcacaactgtagctgcatttcaccaagaatgtagtttacagtcatgtactcaacatcaaccatatgtagttgatgacccgtgtcctattcacttctattctaaatggtatattagagtaggagctagaaaatcagcacctttaattgaattgtgcgtggatgaggctggttctaaatcacccattcagtacatcgatatcggtaattatacagtttcctgtttaccttttacaattaattgccaggaacctaaattgggtagtcttgtagtgcgttgttcgttctatgaagactttttagagtatcatgacgttcgtgttgttttagatttcatctaaacgaacaaactaaaatgtctgataatggaccccaaaatcagcgaaatgcaccccgcattacgtttggtggaccctcagattcaactggcagtaaccagaatggagaacgcagtggggcgcgatcaaaacaacgtcggccccaaggtttacccaataatactgcgtcttggttcaccgctctcactcaacatggcaaggaagaccttaaattccctcgaggacaaggcgttccaattaacaccaatagcagtccagatgaccaaattggctactaccgaagagctaccagacgaattcgtggtggtgacggtaaaatgaaagatctcagtccaagatggtatttctactacctaggaactgggccagaagctggacttccctatggtgctaacaaagacggcatcatatgggttgcaactgagggagccttgaatacaccaaaagatcacattggcacccgcaatcctgctaacaatgctgcaatcgtgctacaacttcctcaaggaacaacattgccaaaaggcttctacgcagaagggagcagaggcggcagtcaagcctcttctcgttcctcatcacgtagtcgcaacagttcaagaaattcaactccaggcagcagtaggggaacttctcctgctagaatggctggcaatggcggtgatgctgctcttgctttgctgctgcttgacagattgaaccagcttgagagcaaaatgtctggtaaaggccaacaacaacaaggccaaactgtcactaagaaatctgctgctgaggcttctaagaagcctcggcaaaaacgtactgccactaaagcatacaatgtaacacaagctttcggcagacgtggtccagaacaaacccaaggaaattttggggaccaggaactaatcagacaaggaactgattacaaacattggccgcaaattgcacaatttgcccccagcgcttcagcgttcttcggaatgtcgcgcattggcatggaagtcacaccttcgggaacgtggttgacctacacaggtgccatcaaattggatgacaaagatccaaatttcaaagatcaagtcattttgctgaataagcatattgacgcatacaaaacattcccaccaacagagcctaaaaaggacaaaaagaagaaggctgatgaaactcaagccttaccgcagagacagaagaaacagcaaactgtgactcttcttcctgctgcagatttggatgatttctccaaacaattgcaacaatccatgagcagtgctgactcaactcaggcctaaactcatgcagaccacacaaggcagatgggctatataaacgttttcgcttttccgtttacgatatatagtctactcttgtgcagaatgaattctcgtaactacatagcacaagtagatgtagttaactttaatctcacatagcaatctttaatcagtgtgtaacattagggaggacttgaaagagccaccacattttcaccgaggccacgcggagtacgatcgagtgtacagtgaacaatgctagggagagctgcctatatggaagagccctaatgtgtaaaattaattttagtagtgctatccccatgtgattttaatagcttcttaggagaatgacaaaaaaaaaaaaaaaaaaaaaaaaaaaaaaaaaaaaaaaaaaaaaaaaaaaaaaaaaaagggtcggcatggcatctccacctcctcgcggtccgacctgggcatccgaaggaggacgcacgtccactcggatggctaagggagcagcacactggcggccgttactagggccgcgcccttcccaacagttgcgcagcctgaatggcgaatggagatccaatttttaagtgtataatgtgttaaactactgattctaattgtttgtgtattttagattcacagtcccaaggctcatttcaggcccctcagtcctcacagtctgttcatgatcataatcagccataccacatttgtagaggttttacttgctttaaaaaacctcccacacctccccctgaacctgaaacataaaatgaatgcaattgttgttgttaacttgtttattgcagcttataatggttacaaataaagcaatagcatcacaaatttcacaaataaagcatttttttcactgcattctagttgtggtttgtccaaactcatcaatgtatcttaaagcttgagtattctatagtctcacctaaatagcttggcgtaatcatggtcatagctgtttcctgtgtgaaattgttatccgctcacaattccacacaacatacgagccggaagcataaagtgtaaagcctggggtgcctaatgagtgagctaactcacattaattgcgttgcgctcactgcccgctttccagtcgggaaacctgtcgtgccagctgcattaatgaatcggccaacgcgaaccccttgcggccgcccgggccgtcgaccaattctcatgtttgacagcttatcatcgaatttctgccattcatccgcttattatcacttattcaggcgtagcaaccaggcgtttaagggcaccaataactgccttaaaaaaattacgccccgccctgccactcatcgcagtactgttgtaattcattaagcattctgccgacatggaagccatcacaaacggcatgatgaacctgaatcgccagcggcatcagcaccttgtcgccttgcgtataatatttgcccatggtgaaaacgggggcgaagaagttgtccatattggccacgtttaaatcaaaactggtgaaactcacccagggattggctgagacgaaaaacatattctcaataaaccctttagggaaataggccaggttttcaccgtaacacgccacatcttgcgaatatatgtgtagaaactgccggaaatcgtcgtggtattcactccagagcgatgaaaacgtttcagtttgctcatggaaaacggtgtaacaagggtgaacactatcccatatcaccagctcaccgtctttcattgccatacgaaattccggatgagcattcatcaggcgggcaagaatgtgaataaaggccggataaaacttgtgcttatttttctttacggtctttaaaaaggccgtaatatccagctgaacggtctggttataggtacattgagcaactgactgaaatgcctcaaaatgttctttacgatgccattgggatatatcaacggtggtatatccagtgatttttttctccattttagcttccttagctcctgaaaatctcgataactcaaaaaatacgcccggtagtgatcttatttcattatggtgaaagttggaacctcttacgtgccgatcaacgtctcattttcgccaaaagttggcccagggcttcccggtatcaacagggacaccaggatttatttattctgcgaagtgatcttccgtcacaggtatttattcgcgataagctcatggagcggcgtaaccgtcgcacaggaaggacagagaaagcgcggatctgggaagtgacggacagaacggtcaggacctggattggggaggcggttgccgccgctgctgctgacggtgtgacgttctctgttccggtcacaccacatacgttccgccattcctatgcgatgcacatgctgtatgccggtataccgctgaaagttctgcaaagcctgatgggacataagtccatcagttcaacggaagtctacacgaaggtttttgcgctggatgtggctgcccggcaccgggtgcagtttgcgatgccggagtctgatgcggttgcgatgctgaaacaattatcctgagaataaatgccttggcctttatatggaaatgtggaactgagtggatatgctgtttttgtctgttaaacagagaagctggctgttatccactgagaagcgaacgaaacagtcgggaaaatctcccattatcgtagagatccgcattattaatctcaggagcctgtgtagcgtttataggaagtagtgttctgtcatgatgcctgcaagcggtaacgaaaacgatttgaatatgccttcaggaacaatagaaatcttcgtgcggtgttacgttgaagtggagcggattatgtcagcaatggacagaacaacctaatgaacacagaaccatgatgtggtctgtccttttacagccagtagtgctcgccgcagtcgagcgacagggcgaagccctcggctggttgccctcgccgctgggctggcggccgtctatggccctgcaaacgcgccagaaacgccgtcgaagccgtgtgcgagacaccgcggccggccgccggcgttgtggatacctcgcggaaaacttggccctcactgacagatgaggggcggacgttgacacttgaggggccgactcacccggcgcggcgttgacagatgaggggcaggctcgatttcggccggcgacgtggagctggccagcctcgcaaatcggcgaaaacgcctgattttacgcgagtttcccacagatgatgtggacaagcctggggataagtgccctgcggtattgacacttgaggggcgcgactactgacagatgaggggcgcgatccttgacacttgaggggcagagtgctgacagatgaggggcgcacctattgacatttgaggggctgtccacaggcagaaaatccagcatttgcaagggtttccgcccgtttttcggccaccgctaacctgtcttttaacctgcttttaaaccaatatttataaaccttgtttttaaccagggctgcgccctgtgcgcgtgaccgcgcacgccgaaggggggtgcccccccttctcgaaccctcccggtcgagtgagcgaggaagcaccagggaacagcacttatatattctgcttacacacgatgcctgaaaaaacttcccttggggttatccacttatccacggggatatttttataattattttttttatagtttttagatcttcttttttagagcgccttgtaggcctttatccatgctggttctagagaaggtgttgtgacaaattgccctttcagtgtgacaaatcaccctcaaatgacagtcctgtctgtgacaaattgcccttaaccctgtgacaaattgccctcagaagaagctgttttttcacaaagttatccctgcttattgactcttttttatttagtgtgacaatctaaaaacttgtcacacttcacatggatctgtcatggcggaaacagcggttatcaatcacaagaaacgtaaaaatagcccgcgaatcgtccagtcaaacgacctcactgaggcggcatatagtctctcccgggatcaaaaacgtatgctgtatctgttcgttgaccagatcagaaaatctgatggcaccctacaggaacatgacggtatctgcgagatccatgttgctaaatatgctgaaatattcggattgacctctgcggaagccagtaaggatatacggcaggcattgaagagtttcgcggggaaggaagtggttttttatcgccctgaagaggatgccggcgatgaaaaaggctatgaatcttttccttggtttatcaaacgtgcgcacagtccatccagagggctttacagtgtacatatcaacccatatctcattcccttctttatcgggttacagaaccggtttacgcagtttcggcttagtgaaacaaaagaaatcaccaatccgtatgccatgcgtttatacgaatccctgtgtcagtatcgtaagccggatggctcaggcatcgtctctctgaaaatcgactggatcatagagcgttaccagctgcctcaaagttaccagcgtatgcctgacttccgccgccgcttcctgcaggtctgtgttaatgagatcaacagcagaactccaatgcgcctctcatacattgagaaaaagaaaggccgccagacgactcatatcgtattttccttccgcgatatcacttccatgacgacaggatagtctgagggttatctgtcacagatttgagggtggttcgtcacatttgttctgacctactgagggtaatttgtcacagttttgctgtttccttcagcctgcatggattttctcatactttttgaactgtaatttttaaggaagccaaatttgagggcagtttgtcacagttgatttccttctctttcccttcgtcatgtgacctgatatcgggggttagttcgtcatcattgatgagggttgattatcacagtttattactctgaattggctatccgcgtgtgtacctctacctggagtttttcccacggtggatatttcttcttgcgctgagcgtaagagctatctgacagaacagttcttctttgcttcctcgccagttcgctcgctatgctcggttacacggctgcggcg

SEQ ID NO: 68 - DNA, 35283 bp, Artificial Sequence
  Clone pCCI-4K-SARS-CoV-2-7N-1-Delta. Based on SARS-CoV-2.
gatgtgctgcaaggcgattaagttgggtaacgccagggttttcccagtcacgacgttgtaaaacgacggccagtgaattgtaatacgactcactatagggcgaattctagttattaatagtaatcaattacggggtcattagttcatagcccatatatggagttccgcgttacataacttacggtaaatggcccgcctggctgaccgcccaacgacccccgcccattgacgtcaataatgacgtatgttcccatagtaacgccaatagggactttccattgacgtcaatgggtggagtatttacggtaaactgcccacttggcagtacatcaagtgtatcatatgccaagtacgccccctattgacgtcaatgacggtaaatggcccgcctggcattatgcccagtacatgaccttatgggactttcctacttggcagtacatctacgtattagtcatcgctattaccatggtgatgcggttttggcagtacatcaatgggcgtggatagcggtttgactcacggggatttccaagtctccaccccattgacgtcaatgggagtttgttttggcaccaaaatcaacgggactttccaaaatgtcgtaacaactccgccccattgacgcaaatgggcggtaggcgtgtacggtgggaggtctatataagcagagctggtttagtgaaccgtattaaaggtttataccttcccaggtaacaaaccaaccaactttcgatctcttgtagatctgttctctaaacgaactttaaaatctgtgtggctgtcactcggctgcatgcttagtgcactcacgcagtataattaataactaattactgtcgttgacaggacacgagtaactcgtctatcttctgcaggctgcttacggtttcgtccgtgttgcagccgatcatcagcacatctaggtttcgtccgggtgtgaccgaaaggtaagatggagagccttgtccctggtttcaacgagaaaacacacgtccaactcagtttgcctgttttacaggttcgcgacgtgctcgtacgtggctttggagactccgtggaggaggtcttatcagaggcacgtcaacatcttaaagatggcacttgtggcttagtagaagttgaaaaaggcgttttgcctcaacttgaacagccctatgtgttcatcaaacgttcggatgctcgaactgcacctcatggtcatgttatggttgagctggtagcagaactcgaaggcattcagtacggtcgtagtggtgagacacttggtgtccttgtccctcatgtgggcgaaataccagtggcttaccgcaaggttcttcttcgtaagaacggtaataaaggagctggtggccatagttacggcgccgatctaaagtcatttgacttaggcgacgagcttggcactgatccttatgaagattttcaagaaaactggaacactaaacatagcagtggtgttacccgtgaactcatgcgtgagcttaacggaggggcatacactcgctatgtcgataacaacttctgtggccctgatggctaccctcttgagtgcattaaagaccttctagcacgtgctggtaaagcttcatgcactttgtccgaacaactggactttattgacactaagaggggtgtatactgctgccgtgaacatgagcatgaaattgcttggtacacggaacgttctgaaaagagctatgaattgcagacaccttttgaaattaaattggcaaagaaatttgacaccttcaatggggaatgtccaaattttgtatttcccttaaattccataatcaagactattcaaccaagggttgaaaagaaaaagcttgatggctttatgggtagaattcgatctgtctatccagttgcgtcaccaaatgaatgcaaccaaatgtgcctttcaactctcatgaagtgtgatcattgtggtgaaacttcatggcagacgggcgattttgttaaagccacttgcgaattttgtggcactgagaatttgactaaagaaggtgccactacttgtggttacttaccccaaaatgctgttgttaaaatttattgtccagcatgtcacaattcagaagtaggacctgagcatagtcttgccgaataccataatgaatctggcttgaaaaccattcttcgtaagggtggtcgcactattgcctttggaggctgtgtgttctcttatgttggttgccataacaagtgtgcctattgggtcccacgtgctagcgctaacataggttgtaaccatacaggtgttgttggagaaggttccgaaggtcttaatgacaaccttcttgaaatactccaaaaagagaaagtcaacatcaatattgttggtgactttaaacttaatgaagagatcgccattattttggcatctttttctgcttccacaagtgcttttgtggaaactgtgaaaggtttggattataaagcattcaaacaaattgttgaatcctgtggtaattttaaagttacaaaaggaaaagctaaaaaaggtgcctggaatattggtgaacagaaatcaatactgagtcctctttatgcatttgcatcagaggctgctcgtgttgtacgatcaattttctcccgcactcttgaaactgctcaaaattctgtgcgtgttttacagaaggccgctataacaatactagatggaatttcacagtattcactgagactcattgatgctatgatgttcacatctgatttggctactaacaatctagttgtaatggcctacattacaggtggtgttgttcagttgacttcgcagtggctaactaacatctttggcactgtttatgaaaaactcaaacccgtccttgattggcttgaagagaagtttaaggaaggtgtagagtttcttagagacggttgggaaattgttaaatttatctcaacctgtgcttgtgaaattgtcggtggacaaattgtcacctgtgcaaaggaaattaaggagagtgttcagacattctttaagcttgtaaataaatttttggctttgtgtgctgactctatcattattggtggagctaaacttaaagccttgaatttaggtgaaacatttgtcacgcactcaaagggattgtacagaaagtgtgttaaatccagagaagaaactggcctactcatgcctctaaaagccccaaaagaaattatcttcttagagggagaaacacttcccacagaagtgttaacagaggaagttgtcttgaaaactggtgatttacaaccattagaacaacctactagtgaagctgttgaagctccattggttggtacaccagtttgtattaacgggcttatgttgctcgaaatcaaagacacagaaaagtactgtgcccttgcacctaatatgatggtaacaaacaataccttcacactcaaaggcggtgcaccaacaaaggttacttttggtgatgacactgtgatagaagtgcaaggttacaagagtgtgaatatcacttttgaacttgatgaaaggattgataaagtacttaatgagaagtgctctgcctatacagttgaactcggtacagaagtaaatgagttcgcctgtgttgtggcagatgctgtcataaaaactttgcaaccagtatctgaattacttacaccactgggcattgatttagatgagtggagtatggctacatactacttatttgatgagtctggtgagtttaaattggcttcacatatgtattgttctttctaccctccagatgaggatgaagaagaaggtgattgtgaagaagaagagtttgagccatcaactcaatatgagtatggtactgaagatgattaccaaggtaaacctttggaatttggtgccacttctgctgctcttcaacctgaagaagagcaagaagaagattggttagatgatgatagtcaacaaactgttggtcaacaagacggcagtgaggacaatcagacaactactattcaaacaattgttgaggttcaacctcaattagagatggaacttacaccagttgttcagactattgaagtgaatagttttagtggttatttaaaacttactgacaatgtatacattaaaaatgcagacattgtggaagaagctaaaaaggtaaaaccaacagtggttgttaatgcagccaatgtttaccttaaacatggaggaggtgttgcaggagccttaaataaggctactaacaatgccatgcaagttgaatctgatgattacatagctactaatggaccacttaaagtgggtggtagttgtgttttaagcggacacaatcttgctaaacactgtcttcatgttgtcggcccaaatgttaacaaaggtgaagacattcaacttcttaagagtgcttatgaaaattttaatcagcacgaagttctacttgcaccattattatcagctggtatttttggtgctgaccctatacattctttaagagtttgtgtagatactgttcgcacaaatgtctacttagctgtctttgataaaaatctctatgacaaacttgtttcaagctttttggaaatgaagagtgaaaagcaagttgaacaaaagatcgctgagattcctaaagaggaagttaagccatttataactgaaagtaaaccttcagttgaacagagaaaacaagatgataagaaaatcaaagcttgtgttgaagaagttacaacaactctggaagaaactaagttcctcacagaaaacttgttactttatattgacattaatggcaatcttcatccagattctgccactcttgttagtgacattgacatcactttcttaaagaaagatgctccatatatagtgggtgatgttgttcaagagggtgttttaactgctgtggttatacctactaaaaaggctggtggcactactgaaatgctagcgaaagctttgagaaaagtgccaacagacaattatataaccacttacccgggtcagggtttaaatggttacactgtagaggaggcaaagacagtgcttaaaaagtgtaaaagtgccttttacattctaccatctattatctctaatgagaagcaagaaattcttggaactgtttcttggaatttgcgagaaatgcttgcacatgcagaagaaacacgcaaattaatgcctgtctgtgtggaaactaaagccatagtttcaactatacagcgtaaatataagggtattaaaatacaagagggtgtggttgattatggtgctagattttacttttacaccagtaaaacaactgtagcgtcacttatcaacacacttaacgatctaaatgaaactcttgttacaatgccacttggctatgtaacacatggcttaaatttggaagaagctgctcggtatatgagatctctcaaagtgccagctacagtttctgtttcttcacctgatgctgttacagcgtataatggttatcttacttcttcttctaaaacacctgaagaacattttattgaaaccatctcacttgctggttcctataaagattggtcctattctggacaatctacacaactaggtatagaatttcttaagagaggtgataaaagtgtatattacactagtaatcctaccacattccacctagatggtgaagttatcacctttgacaatcttaagacacttctttctttgagagaagtgaggactattaaggtgtttacaacagtagacaacattaacctccacacgcaagttgtggacatgtcaatgacatatggacaacagtttggtccaacttatttggatggagctgatgttactaaaataaaacctcataattcacatgaaggtaaaacattttatgttttacctaatgatgacactctacgtgttgaggcttttgagtactaccacacaactgatcctagttttctgggtaggtacatgtcagcattaaatcacactaaaaagtggaaatacccacaagttaatggtttaacttctattaaatgggcagataacaactgttatcttgccactgcattgttaacactccaacaaatagagttgaagtttaatccacctgctctacaagatgcttattacagagcaagggctggtgaagctgctaacttttgtgcacttatcttagcctactgtaataagacagtaggtgagttaggtgatgttagagaaacaatgagttacttgtttcaacatgccaatttagattcttgcaaaagagtcttgaacgtggtgtgtaaaacttgtggacaacagcagacaacccttaagggtgtagaagctgttatgtacatgggcacactttcttatgaacaatttaagaaaggtgttcagataccttgtacgtgtggtaaacaagctacaaaatatctagtacaacaggagtcaccttttgttatgatgtcagcaccacctgctcagtatgaacttaagcatggtacatttacttgtgctagtgagtacactggtaattaccagtgtggtcactataaacatataacttctaaagaaactttgtattgcatagacggtgctttacttacaaagtcctcagaatacaaaggtcctattacggatgttttctacaaagaaaacagttacacaacaaccataaaaccagttacttataaattggatggtgttgtttgtacagaaattgaccctaagttggacaattattataagaaagacaattcttatttcacagagcaaccaattgatcttgtaccaaaccaaccatatccaaacgcaagcttcgataattttaagtttgtatgtgataatatcaaatttgctgatgatttaaaccagttaactggttataagaaacctgcttcaagagagcttaaagttacatttttccctgacttaaatggtgatgtggtggctattgattataaacactacacaccctcttttaagaaaggagctaaattgttacataaacctattgtttggcatgttaacaatgcaactaataaagccacgtataaaccaaatacctggtgtatacgttgtctttggagcacaaaaccagttgaaacatcaaattcgtttgatgtactgaagtcagaggacgcgcagggaatggataatcttgcctgcgaagatctaaaaccagtctctgaagaagtagtggaaaatcctaccatacagaaagacgttcttgagtgtaatgtgaaaactaccgaagttgtaggagacattatacttaaaccagcaaataatagtttaaaaattacagaagaggttggccacacagatctaatggctgcttatgtagacaattctagtcttactattaagaaacctaatgaattatctagagtattaggtttgaaaacccttgctactcatggtttagctgctgttaatagtgtcccttgggatactatagctaattatgctaagccttttcttaacaaagttgttagtacaactactaacatagttacacggtgtttaaaccgtgtttgtactaattatatgccttatttctttactttattgctacaattgtgtacttttactagaagtacaaattctagaattaaagcatctatgccgactactatagcaaagaatactgttaagagtgtcggtaaattttgtctagaggcttcatttaattatttgaagtcacctaatttttctaaactgataaatattataatttggtttttactattaagtgtttgcctaggttctttaatctactcaaccgcggcgttaggtgttttaatgtctaatttaggtatgccgtcttactgtacgggttaccgtgaaggttatttgaactctacgaatgtcacgattgcgacgtactgtacgggttctataccgtgtagtgtttgtcttagtggtttagattctttagacacgtatccgtctttagaaacgatacaaattacgatttcatcttttaaatgggatttaacggcgtttggtttagttgcggagtggtttttggcgtatattcttttcacgcgttttttctatgtacttggtttggcggcgatcatgcaattgtttttcagctattttgcggtacattttattagtaattcttggcttatgtggttaataattaatcttgtacaaatggcgccgatttcagcgatggttagaatgtacatcttctttgcgtcattttattatgtatggaaaagttatgtgcatgttgtagacggttgtaattcatcaacgtgtatgatgtgttacaaacgtaatagagcgacgcgtgtcgaatgtacgacgattgttaatggtgttagacgttccttttatgtctatgcgaatggtggtaaaggtttttgcaaactacacaattggaattgtgttaattgtgatacgttctgtgcgggtagtacgtttattagtgatgaagttgcgcgtgacttgtcactacagtttaaacgtccgataaatccgacggaccagtcttcttacatcgttgatagtgttacggtgaagaatggttccatccatctttactttgataaagcgggtcaaaagacgtatgaacgtcattctctctctcattttgttaacttagacaacctgcgtgcgaataacacgaaaggttcattgccgattaatgttatagtttttgatggtaaatcaaaatgtgaagaatcatctgcgaaatcagcgtctgtttactacagtcagcttatgtgtcaaccgatactgttactagatcaggcgttagtgtctgatgttggtgatagtgcggaagttgcggttaaaatgtttgatgcgtacgttaatacgttttcatcaacgtttaacgtaccgatggaaaaactcaaaacgctagttgcgacggcggaagcggaacttgcgaagaatgtgtccttagacaatgtcttatctacgtttatttcagcggcgcgtcaaggttttgttgattcagatgtagaaacgaaagatgttgttgaatgtcttaaattgtcacatcaatctgacatagaagttacgggtgatagttgtaataactatatgctcacgtataacaaagttgaaaacatgacgccgcgtgaccttggtgcgtgtattgactgtagtgcgcgtcatattaatgcgcaggtagcgaaaagtcacaacattgcgttgatatggaacgttaaagatttcatgtcattgtctgaacaactacgtaaacaaatacgtagtgcggcgaaaaagaataacttaccgtttaagttgacgtgtgcgacgacgcgtcaagttgttaatgttgtaacgacgaagatagcgcttaagggtggtaaaattgttaataattggttgaagcaattaattaaagttacacttgtgttcctttttgttgctgctattttctatttaataacacctgttcatgtcatgtctaaacatactgacttttcaagtgaaatcataggatacaaggctattgatggtggtgtcactcgtgacatagcatctacagatacttgttttgctaacaaacatgctgattttgacacatggtttagccagcgtggtggtagttatactaatgacaaagcttgcccattgattgctgcagtcataacaagagaagtgggttttgtcgtgcctggtttgcctggcacgatattacgcacaactaatggtgactttttgcatttcttacctagagtttttagtgcagttggtaacatctgttacacaccatcaaaacttatagagtacactgactttgcaacatcagcttgtgttttggctgctgaatgtacaatttttaaagatgcttctggtaagccagtaccatattgttatgataccaatgtactagaaggttctgttgcttatgaaagtttacgccctgacacacgttatgtgctcatggatggctctattattcaatttcctaacacctaccttgaaggttctgttagagtggtaacaacttttgattctgagtactgtaggcacggcacttgtgaaagatcagaagctggtgtttgtgtatctactagtggtagatgggtacttaacaatgattattacagatctttaccaggagttttctgtggtgtagatgctgtaaatttacttactaatatgtttacaccactaattcaacctattggtgctttggacatatcagcatctatagtagctggtggtattgtagctatcgtagtaacatgccttgcctactattttatgaggtttagaagagcttttggtgaatacagtcatgtagttgcctttaatactttactattccttatgtcattcactgtactctgtttaacaccagtttactcattcttacctggtgtttattctgttatttacttgtacttgacattttatcttactaatgatgtttcttttttagcacatattcagtggatggttatgttcacacctttagtacctttctggataacaattgcttatatcatttgtatttccacaaagcatttctattggttctttagtaattacctaaagagacgtgtagtctttaatggtgtttcctttagtacttttgaagaagctgcgctgtgcacctttttgttaaataaagaaatgtatctaaagttgcgtagtgatgtgctattacctcttacgcaatataatagatacttagctctttataataagtacaagtattttagtggagcaatggatacaactagctacagagaagctgcttgttgtcatctcgcaaaggctctcaatgacttcagtaactcaggttctgatgttctttaccaaccaccacaaacctctatcacctcagctgttttgcagagtggttttagaaaaatggcattcccatctggtaaagttgagggttgtatggtacaagtaacttgtggtacaactacacttaacggtctttggcttgatgacgtagtttactgtccaagacatgtgatctgcacctctgaagacatgcttaaccctaattatgaagatttactcattcgtaagtctaatcataatttcttggtacaggctggtaatgttcaactcagggttattggacattctatgcaaaattgtgtacttaagcttaaggttgatacagccaatcctaagacacctaagtataagtttgttcgcattcaaccaggacagactttttcagtgttagcttgttacaatggttcaccatctggtgtttaccaatgtgctatgaggcccaatttcactattaagggttcattccttaatggttcatgtggtagtgttggttttaacatagattatgactgtgtctctttttgttacatgcaccatatggaattaccaactggagttcatgctggcacagacttagaaggtaacttttatggaccttttgttgacaggcaaacagcacaagcagctggtacggacacaactattacagttaatgttttagcttggttgtacgctgctgttataaatggagacaggtggtttctcaatcgatttaccacaactcttaatgactttaaccttgtggctatgaagtacaattatgaacctctaacacaagaccatgttgacatactaggacctctttctgctcaaactggaattgccgttttagatatgtgtgcttcattaaaagaattactgcaaaatggtatgaatggacgtaccatattgggtagtgctttattagaagatgaatttacaccttttgatgttgttagacaatgctcaggtgttactttccaaagtgcagtgaaaagaacaatcaagggtacacaccactggttgttactcacaattttgacttcacttttagttttagtccagagtactcaatggtctttgttcttttttttgtatgaaaatgcctttttaccttttgctatgggtattattgctatgtctgcttttgcaatgatgtttgtcaaacataagcatgcatttctctgtttgtttttgttaccttctcttgccactgtagcttattttaatatggtctatatgcctgctagttgggtgatgcgtattatgacatggttggatatggttgatactagtttgtctggttttaagctaaaagactgtgttatgtatgcatcagctgtagtgttactaatccttatgacagcaagaactgtgtatgatgatggtgctaggagagtgtggacacttatgaatgtcttgacactcgtttataaagtttattatggtaatgctttagatcaagccatttccatgtgggctcttataatctctgttacttctaactactcaggtgtagttacaactgtcatgtttttggccagaggtattgtttttatgtgtgttgagtattgccctattttcttcataactggtaatacacttcagtgtataatgctagtttattgtttcttaggctatttttgtacttgttactttggcctcttttgtttactcaaccgctactttagactgactcttggtgtttatgattacttagtttctacacaggagtttagatatatgaattcacagggactactcccacccaagaatagcatagatgccttcaaactcaacattaaattgttgggtgttggtggcaaaccttgtatcaaagtagccactgtacagtctaaaatgtcagatgtaaagtgcacatcagtagtcttactctcagttttgcaacaactcagagtagaatcatcatctaaattgtgggctcaatgtgtccagttacacaatgacattctcttagctaaagatactactgaagcctttgaaaaaatggtttcactactttctgttttgctttccatgcagggtgctgtagacataaacaagctttgtgaagaaatgctggacaacagggcaaccttacaagctatagcctcagagtttagttcccttccatcatatgcagcttttgctactgctcaagaagcttatgagcaggctgttgctaatggtgattctgaagttgttcttaaaaagttgaagaagtctttgaatgtggctaaatctgaatttgaccgtgatgcagccatgcaacgtaagttggaaaagatggctgatcaagctatgacccaaatgtataaacaggctagatctgaggacaagagggcaaaagttactagtgctatgcagacaatgcttttcactatgcttagaaagttggataatgatgcactcaacaacattatcaacaatgcaagagatggttgtgttcccttgaacataatacctcttacaacagcagccaaactaatggttgtcataccagactataacacatataaaaatacgtgtgatggtacaacatttacttatgcatcagcattgtgggaaatccaacaggttgtagatgcagatagtaaaattgttcaacttagtgaaattagtatggacaattcacctaatttagcatggcctcttattgtaacagctttaagggccaattctgctgtcaaattacagaataatgagcttagtcctgttgcactacgacagatgtcttgtgctgccggtactacacaaactgcttgcactgatgacaatgcgttagcttactacaacacaacaaagggaggtaggtttgtacttgcactgttatccgatttacaggatttgaaatgggctagattccctaagagtgatggaactggtactatctatacagaactggaaccaccttgtaggtttgttacagacacacctaaaggtcctaaagtgaagtatttatactttattaaaggattaaacaacctaaatagaggtatggtacttggtagtttagctgccacagtacgtctacaagctggtaatgcaacagaagtgcctgccaattcaactgtattatctttctgtgcttttgctgtagatgctgctaaagcttacaaagattatctagctagtgggggacaaccaatcactaattgtgttaagatgttgtgtacacacactggtactggtcaggcaataacagttacaccggaagccaatatggatcaagaatcctttggtggtgcatcgtgttgtctgtactgccgttgccacatagatcatccaaatcctaaaggattttgtgacttaaaaggtaagtatgtacaaatacctacaacttgtgctaatgaccctgtgggttttacacttaaaaacacagtctgtaccgtctgcggtatgtggaaaggttatggctgtagttgtgatcaactccgcgaacccatgcttcagtcagctgatgcacaatcgtttttaaacgggtttgcggtgtaagtgcagcccgtcttacaccgtgcggcacaggcactagtactgatgtcgtatacagggcttttgacatctacaatgataaagtagctggttttgctaaattcctaaaaactaattgttgtcgcttccaagaaaaggacgaagatgacaatttaattgattcttactttgtagttaagagacacactttctctaactaccaacatgaagaaacaatttataatttacttaaggattgtccagctgttgctaaacatgacttctttaagtttagaatagacggtgacatggtaccacatatatcacgtcaacgtcttactaaatacacaatggcagacctcgtctatgctttaaggcattttgatgaaggtaattgtgacacattaaaagaaatacttgtcacatacaattgttgtgatgatgattatttcaataaaaaggactggtatgattttgtagaaaacccagatatattacgcgtatacgccaacttaggtgaacgtgtacgccaagctttgttaaaaacagtacaattctgtgatgccatgcgaaatgctggtattgttggtgtactgacattagataatcaagatctcaatggtaactggtatgatttcggtgatttcatacaaaccacgccaggtagtggagttcctgttgtagattcttattattcattgttaatgcctatattaaccttgaccagggctttaactgcagagtcacatgttgacactgacttaacaaagccttacattaagtgggatttgttaaaatatgacttcacggaagagaggttaaaactctttgaccgttattttaaatattgggatcagacataccacccaaattgtgttaactgtttggatgacagatgcattctgcattgtgcaaactttaatgttttattctctacagtgttcccacctacaagttttggaccactagtgagaaaaatatttgttgatggtgttccatttgtagtttcaactggataccacttcagagagctaggtgttgtacataatcaggatgtaaacttacatagctctagacttagttttaaggaattacttgtgtatgctgctgaccctgctatgcacgctgcttctggtaatctattactagataaacgcactacgtgcttttcagtagctgcacttactaacaatgttgcttttcaaactgtcaaacccggtaattttaacaaagacttctatgactttgctgtgtctaagggtttctttaaggaaggaagttctgttgaattaaaacacttcttctttgctcaggatggtaatgctgctatcagcgattatgactactatcgttataatctaccaacaatgtgtgatatcagacaactactatttgtagttgaagttgttgataagtactttgattgttacgatggtggctgtattaatgctaaccaagtcatcgtcaacaacctagacaaatcagctggttttccatttaataaatggggtaaggctagactttattatgattcaatgagttatgaggatcaagatgcacttttcgcatatacaaaacgtaatgtcatccctactataactcaaatgaatcttaagtatgccattagtgcaaagaatagagctcgcaccgtagctggtgtctctatctgtagtactatgaccaatagacagtttcatcaaaaattattgaaatcaatagccgccactagaggagctactgtagtaattggaacaagcaaattctatggtggttggcacaacatgttaaaaactgtttatagtgatgtagaaaaccctcaccttatgggttgggattatcctaaatgtgatagagccatgcctaacatgcttagaattatggcctcacttgttcttgctcgcaaacatacaacgtgttgtagcttgtcacaccgtttctatagattagctaatgagtgtgctcaagtattgagtgaaatggtcatgtgtggcggttcactatatgttaaaccaggtggaacctcatcaggagatgccacaactgcttatgctaatagtgtttttaacatttgtcaagctgtcacggccaatgttaatgcacttttatctactgatggtaacaaaattgccgataagtatgtccgcaatttacaacacagactttatgagtgtctctatagaaatagagatgttgacacagactttgtgaatgagttttacgcatatttgcgtaaacatttctcaatgatgatactctctgacgatgctgttgtgtgtttcaatagcacttatgcatctcaaggtctagtggctagcataaagaactttaagtcagttctttattatcaaaacaatgtttttatgtctgaagcaaaatgttggactgagactgaccttactaaaggacctcatgaattttgctctcaacatacaatgctagttaaacagggtgatgattatgtgtaccttccttacccagatccatcaagaatcctaggggccggctgttttgtagatgatatcgtaaaaacagatggtacacttatgattgaacggttcgtgtctttagctatagatgcttacccacttactaaacatcctaatcaggagtatgctgatgtctttcatttgtacttacaatacataagaaagctacatgatgagttaacaggacacatgttagacatgtattctgttatgcttactaatgataacacttcaaggtattgggaacctgagttttatgaggctatgtacacaccgcatacagtcttacaggctgttggggcttgtgttctttgcaattcacagacttcattaagatgtggtgcttgcatacgtagaccattcttatgttgtaaatgctgttacgaccatgtcatatcaacatcacataaattagtcttgtctgttaatccgtatgtttgcaatgctccaggttgtgatgtcacagatgtgactcaactttacttaggaggtatgagctattattgtaaatcacataaaccacccattagttttccattgtgtgctaatggacaagtttttggtttatataaaaatacatgtgttggtagcgataatgttactgactttaatgcaattgcaacatgtgactggacaaatgctggtgattacattttagctaacacctgtactgaaagactcaagctttttgcagcagaaacgctcaaagctactgaggagacatttaaactgtcttatggtattgctactgtacgtgaagtgctgtctgacagagaattacatctttcatgggaagttggtaaacctagaccaccacttaaccgaaattatgtctttactggttatcgtgtaactaaaaacagtaaagtacaaataggagagtacacctttgaaaaaggtgactatggtgatgctgttgtttaccgaggtacaacaacttacaaattaaatgttggtgattattttgtgctgacatcacatacagtaatgccattaagtgcacctacactagtgccacaagagcactatgttagaattactggcttatacccaacactcaatatctcagatgagttttctagcaatgttgcaaattatcaaaaggttggtatgcaaaagtattctacactccagggaccacctggtactggtaagagtcattttgctattggcctagctctctactacccttctgctcgcatagtgtatacagcttgctctcatgccgctgttgatgcactatgtgagaaggcattaaaatatttgcctatagataaatgtagtagaattatacctgcacgtgctcgtgtagagtgttttgataaattcaaagtgaattcaacattagaacagtatgtcttttgtactgtaaatgcattgcctgagacgacagcagatatagttgtctttgatgaaatttcaatggccacaaattatgatttgagtgttgtcaatgccagattacgtgctaagcactatgtgtacattggcgaccctgctcaattacctgcaccacgcacattgctaactaagggcacactagaaccagaatatttcaattcagtgtgtagacttatgaaaactataggtccagacatgttcctcggaacttgtcggcgttgtcctgctgaaattgttgacactgtgagtgctttggtttatgataataagcttaaagcacataaagacaaatcagctcaatgctttaaaatgttttataagggtgttatcacgcatgatgtttcatctgcaattaacaggccacaaataggcgtggtaagagaattccttacacgtaaccctgcttggagaaaagctgtctttatttcaccttataattcacagaatgctgtagcctcaaagattttgggactaccaactcaaactgttgattcatcacagggctcagaatatgactatgtcatattcactcaaaccactgaaacagctcactcttgtaatgtaaacagatttaatgttgctattaccagagcaaaagtaggcatactttgcataatgtctgatagagacctttatgacaagttgcaatttacaagtcttgaaattccacgtaggaatgtggcaactttacaagctgaaaatgtaacaggactctttaaagattgtagtaaggtaatcactgggttacatcctacacaggcacctacacacctcagtgttgacactaaattcaaaactgaaggtttatgtgttgacatacctggcatacctaaggacatgacctatagaagactcatctctatgatgggttttaaaatgaattatcaagttaatggttaccctaacatgtttatcacccgcgaagaagctataagacatgtacgtgcatggattggcttcgatgtcgaggggtgtcatgctactagagaagctgttggtaccaatttacctttacagctaggtttttctacaggtgttaacctagttgctgtacctacaggttatgttgatacacctaataatacagatttttccagagttagtgctaaaccaccgcctggagatcaatttaaacacctcataccacttatgtacaaaggacttccttggaatgtagtgcgtataaagattgtacaaatgttaagtgacacacttaaaaatctctctgacagagtcgtatttgtcttatgggcacatggctttgagttgacatctatgaagtattttgtgaaaataggacctgagcgcacctgttgtctatgtgatagacgtgccacatgcttttccactgcttcagacacttatgcctgttggcatcattctattggatttgattacgtctataatccgtttatgattgatgttcaacaatggggttttacaggtaacctacaaagcaaccatgatctgtattgtcaagtccatggtaatgcacatgtagctagttgtgatgcaatcatgactaggtgtctagctgtccacgagtgctttgttaagcgtgttgactggactattgaatatcctataattggtgatgaactgaagattaatgcggcttgtagaaaggttcaacacatggttgttaaagctgcattattagcagacaaattcccagttcttcacgacattggtaaccctaaagctattaagtgtgtacctcaagctgatgtagaatggaagttctatgatgcacagccttgtagtgacaaagcttataaaatagaagaattattctattcttatgccacacattctgacaaattcacagatggtgtatgcctattttggaattgcaatgtcgatagatatcctgctaattccattgtttgtagatttgacactagagtgctatctaaccttaacttgcctggttgtgatggtggcagtttgtatgtaaataaacatgcattccacacaccagcttttgataaaagtgcttttgttaatttaaaacaattaccatttttctattactctgacagtccatgtgagtctcatggaaaacaagtagtgtcagatatagattatgtaccactaaagtctgctacgtgtataacacgttgcaatttaggtggtgctgtctgtagacatcatgctaatgagtacagattgtatctcgatgcttataacatgatgatctcagctggctttagcttgtgggtttacaaacaatttgatacttataacctctggaacacttttacaagacttcagagtttagaaaatgtggcttttaatgttgtaaataagggacactttgatggacaacagggtgaagtaccagtttctatcattaataacactgtttacacaaaagttgatggtgttgatgtagaattgtttgaaaataaaacaacattacctgttaatgtagcatttgagctttgggctaagcgcaacattaaaccagtaccagaggtgaaaatactcaataatttgggtgtggacattgctgctaatactgtgatctgggactacaaaagagatgctccagcacatatatctactattggtgtttgttctatgactgacatagccaagaaaccaactgaaacgatttgtgcaccactcactgtcttttttgatggtagagttgatggtcaagtagacttatttagaaatgcccgtaatggtgttcttattacagaaggtagtgttaaaggtttacaaccatctgtaggtcccaaacaagctagtcttaatggagtcacattaattggagaagccgtaaaaacacagttcaattattataagaaagttgatggtgttgtccaacaattacctgaaacttactttactcagagtagaaatttacaagaatttaaacccaggagtcaaatggaaattgatttcttagaattagctatggatgaattcattgaacggtataaattagaaggctatgccttcgaacatatcgtttatggagattttagtcatagtcagttaggtggtttacatctactgattggactagctaaacgttttaaggaatcaccttttgaattagaagattttattcctatggacagtacagttaaaaactatttcataacagatgcgcaaacaggttcatctaagtgtgtgtgttctgttattgatttattacttgatgattttgttgaaataataaaatcccaagatttatctgtagtttctaaggttgtcaaagtgactattgactatacagaaatttcatttatgctttggtgtaaagatggccatgtagaaacattttacccaaaattacaatctagtcaagcgtggcaaccgggtgttgctatgcctaatctttacaaaatgcaaagaatgctattagaaaagtgtgaccttcaaaattatggtgatagtgcaacattacctaaaggcataatgatgaatgtcgcaaaatatactcaactgtgtcaatatttaaacacattaacattagctgtaccctataatatgagagttatacattttggtgctggttctgataaaggagttgcaccaggtacagctgttttaagacagtggttgcctacgggtacgctgcttgtcgattcagatcttaatgactttgtctctgatgcagattcaactttgattggtgattgtgcaactgtacatacagctaataaatgggatctcattattagtgatatgtacgaccctaagactaaaaatgttacaaaagaaaatgactctaaagagggttttttcacttacatttgtgggtttatacaacaaaagctagctcttggaggttccgtggctataaagataacagaacattcttggaatgctgatctttataagctcatgggacacttcgcatggtggacagcctttgttactaatgtgaatgcgtcatcatctgaagcatttttaattggatgtaattatcttggcaaaccacgcgaacaaatagatggttatgtcatgcatgcaaattacatattttggaggaatacaaatccaattcagttgtcttcctattctttatttgacatgagtaaatttccccttaaattaaggggtactgctgttatgtctttaaaagaaggtcaaatcaatgatatgattttatctcttcttagtaaaggtagacttataattagagaaaacaacagagttgttatttctagtgatgttcttgttaacaactaaacgaacaatgtttgtttttcttgttttattgccactagtctctagtcagtgtgttaatcttacaaccagaactcaattaccccctgcatacactaattctttcacacgtggtgtttattaccctgacaaagttttcagatcctcagttttacattcaactcaggacttgttcttacctttcttttccaatgttacttggttccatgctatacatgtctctgggaccaatggtactaagaggtttgataaccctgtcctaccatttaatgatggtgtttattttgcttccattgagaagtctaacataataagaggctggatttttggtactactttagactcgaagacccagtccctacttattgttaataacgctactaatgttgttattaaagtctgtgaatttcaattttgtaatgatccatttttggatgtttattaccacaaaaacaacaaaagttggatgaaaagtgagttcagagtttattctagtgcgaataattgcacttttgaatatgtctctcagccttttcttatggaccttgaaggaaaacagggtaatttcaaaaatcttagggaatttgtgtttaagaatattgatggttattttaaaatatattctaagcacacgcctattaatttagtgcgtgatctccctcagggtttttcggctttagaaccattggtagatttgccaataggtattaacatcactaggtttcaaactttacttgctttacatagaagttatttgactcctggtgattcttcttcaggttggacagctggtgctgcagcttattatgtgggttatcttcaacctaggacttttctattaaaatataatgaaaatggaaccattacagatgctgtagactgtgcacttgaccctctctcagaaacaaagtgtacgttgaaatccttcactgtagaaaaaggaatctatcaaacttctaactttagagtccaaccaacagaatctattgttagatttcctaatattacaaacttgtgcccttttggtgaagtttttaacgccaccagatttgcatctgtttatgcttggaacaggaagagaatcagcaactgtgttgctgattattctgtcctatataattccgcatcattttccacttttaagtgttatggagtgtctcctactaaattaaatgatctctgctttactaatgtctatgcagattcatttgtaattagaggtgatgaagtcagacaaatcgctccagggcaaactggaaagattgctgattataattataaattaccagatgattttacaggctgcgttatagcttggaattctaacaatcttgattctaaggttggtggtaattataattaccggtatagattgtttaggaagtctaatctcaaaccttttgagagagatatttcaactgaaatctatcaggccggtagcacaccttgtaatggtgttcaaggttttaattgttactttcctttacaatcatatggtttccaacccactaatggtgttggttaccaaccatacagagtagtagtactttcttttgaacttctacatgcaccagcaactgtttgtggacctaaaaagtctactaatttggttaaaaacaaatgtgtcaatttcaacttcaatggtttaacaggcacaggtgttcttactgagtctaacaaaaagtttctgcctttccaacaatttggcagagacattgctgacactactgatgctgtccgtgatccacagacacttgagattcttgacattacaccatgttcttttggtggtgtcagtgttataacaccaggaacaaatacttctaaccaggttgctgttctttatcagggtgttaactgcacagaagtccctgttgctattcatgcagatcaacttactcctacttggcgtgtttattctacaggttctaatgtttttcaaacacgtgcaggctgtttaataggggctgaacatgtcaacaactcatatgagtgtgacatacccattggtgcaggtatatgcgctagttatcagactcagactaattctcgtcggcgggcacgtagtgtagctagtcaatccatcattgcctacactatgtcacttggtgcagaaaattcagttgcttactctaataactctattgccatacccacaaattttactattagtgttaccacagaaattctaccagtgtctatgaccaagacatcagtagattgtacaatgtacatttgtggtgattcaactgaatgcagcaatcttttgttgcaatatggcagtttttgtacacaattaaaccgtgctttaactggaatagctgttgaacaagacaaaaacacccaagaagtttttgcacaagtcaaacaaatttacaaaacaccaccaattaaagattttggtggttttaatttttcacaaatattaccagatccatcaaaaccaagcaagaggtcatttattgaagatctacttttcaacaaagtgacacttgcagatgctggcttcatcaaacaatatggtgattgccttggtgatattgctgctagagacctcatttgtgcacaaaagtttaacggccttactgttttgccacctttgctcacagatgaaatgattgctcaatacacttctgcactgttagcgggtacaatcacttctggttggacctttggtgcaggtgctgcattacaaataccatttgctatgcaaatggcttataggtttaatggtattggagttacacagaatgttctctatgagaaccaaaaattgattgccaaccaatttaatagtgctattggcaaaattcaagactcactttcttccacagcaagtgcacttggaaaacttcaagatgtggtcaaccaaaatgcacaagctttaaacacgcttgttaaacaacttagctccaattttggtgcaatttcaagtgttttaaatgatatcctttcacgtcttgacaaagttgaggctgaagtgcaaattgataggttgatcacaggcagacttcaaagtttgcagacatatgtgactcaacaattaattagagctgcagaaatcagagcttctgctaatcttgctgctactaaaatgtcagagtgtgtacttggacaatcaaaaagagttgatttttgtggaaagggctatcatcttatgtccttccctcagtcagcacctcatggtgtagtcttcttgcatgtgacttatgtccctgcacaagaaaagaacttcacaactgctcctgccatttgtcatgatggaaaagcacactttcctcgtgaaggtgtctttgtttcaaatggcacacactggtttgtaacacaaaggaatttttatgaaccacaaatcattactacagacaacacatttgtgtctggtaactgtgatgttgtaataggaattgtcaacaacacagtttatgatcctttgcaacctgaattagactcattcaaggaggagttagataaatattttaagaatcatacatcaccagatgttgatttaggtgacatctctggcattaatgcttcagttgtaaacattcaaaaagaaattgaccgcctcaatgaggttgccaagaatttaaatgaatctctcatcgatctccaagaacttggaaagtatgagcagtatataaaatggccatggtacatttggctaggttttatagctggcttgattgccatagtaatggtgacaattatgctttgctgtatgaccagttgctgtagttgtctcaagggctgttgttcttgtggatcctgctgcaaatttgatgaagacgactctgagccagtgctcaaaggagtcaaattacattacacataaacgaacttatggatttgtttatgagaatcttcacaattggaactgtaactttgaagcaaggtgaaatcaaggatgctactccttcagattttgttcgcgctactgcaacgataccgatacaagcctcactccctttcggatggcttattgttggcgttgcacttcttgctgtttttcagagcgcttccaaaatcataaccctcaaaaagagatggcaactagcactctccaagggtgttcactttgtttgcaacttgctgttgttgtttgtaacagtttactcacaccttttgctcgttgctgctggccttgaagccccttttctctatctttatgctttagtctacttcttgcagagtataaactttgtaagaataataatgaggctttggctttgctggaaatgccgttccaaaaacccattactttatgatgccaactattttctttgctggcatactaattgttacgactattgtataccttacaatagtgtaacttcttcaattgtcattacttcaggtgatggcacaacaagtcctatttctgaacatgactaccagattggtggttatactgaaaaatgggaatctggagtaaaagactgtgttgtattacacagttacttcacttcagactattaccagctgtactcaactcaattgagtacagacactggtgttgaacatgttaccttcttcatctacaataaaattgttgatgagcctgaagaacatgtccaaattcacacaatcgacggttcatccggagttgttaatccagtaatggaaccaatttatgatgaaccgacgacgactactagcgtgcctttgtaagcacaagctgatgagtacgaacttatgtactcattcgtttcggaagagacaggtacgttaatagttaatagcgtacttctttttcttgctttcgtggtattcttgctagttacactagccatccttactgcgcttcgattgtgtgcgtactgctgcaatattgttaacgtgagtcttgtaaaaccttctttttacgtttactctcgtgttaaaaatctgaattcttctagagttcctgatcttctggtctaaacgaactaaatattatattagtttttctgtttggaactttaattttagccatggcagattccaacggtactattaccgttgaagagcttaaaaagctccttgaacaatggaacctagtaataggtttcctattccttacatggatttgtcttctacaatttgcctatgccaacaggaataggtttttgtatataattaagttaattttcctctggctgttatggccagtaactttagcttgttttgtgcttgctgctgtttacagaataaattggatcaccggtggaattgctatcgcaatggcttgtcttgtaggcttgatgtggctcagctacttcattgcttctttcagactgtttgcgcgtacgcgatccatgtggtcattcaatccagaaactaacattcttctcaacgtgccactccatggcactattctgaccagaccgcttctagaaagtgaactcgtaatcggagctgtgatccttcgtggacatcttcgtattgctggacaccatctaggacgctgtgacatcaaggacctgcctaaagaaatcactgttgctacatcacgaacgctttcttattacaaattgggagcttcgcagcgtgtagcaggtgactcaggttttgctgcatacagtcgctacaggattggcaactataaattaaacacagaccattccagtagcagtgacaatattgctttgcttgtacagtaagtgacaacagatgtttcatctcgttgactttcaggttactatagcagagatattactaattattatgaggacttttaaagtttccatttggaatcttgattacatcataaacctcataattaaaaatttatctaagtcactaactgagaataaatattctcaattagatgaagagcaaccaatggagattgattaaacgaacatgaaaattattcttttcttggcactgataacactcgctacttgtgagctttatcactaccaagagtgtgttagaggtacaacagtacttttaaaagaaccttgctcttctggaacatacgagggcaattcaccatttcatcctctagctgataacaaatttgcactgacttgctttagcactcaatttgcttttgcttgtcctgacggcgtaaaacacgtctatcagttacgtgccagatcagtttcacctaaactgttcatcagacaagaggaagttcaagaactttactctccaatttttcttattgttgcggcaatagtgtttataacactttgcttcacactcaaaagaaagacagaatgattgaactttcattaattgacttctatttgtgctttttagcctttctgctattccttgttttaattatgcttattatcttttggttctcacttgaactgcaagatcataatgaaacttgtcacgcctaaacgaacatgaaatttcttgttttcttaggaatcatcacaactgtagctgcatttcaccaagaatgtagtttacagtcatgtactcaacatcaaccatatgtagttgatgacccgtgtcctattcacttctattctaaatggtatattagagtaggagctagaaaatcagcacctttaattgaattgtgcgtggatgaggctggttctaaatcacccattcagtacatcgatatcggtaattatacagtttcctgtttaccttttacaattaattgccaggaacctaaattgggtagtcttgtagtgcgttgttcgttctatgaagactttttagagtatcatgacgttcgtgttgttttagatttcatctaaacgaacaaactaaaatgtctgataatggaccccaaaatcagcgaaatgcaccccgcattacgtttggtggaccctcagattcaactggcagtaaccagaatggagaacgcagtggggcgcgatcaaaacaacgtcggccccaaggtttacccaataatactgcgtcttggttcaccgctctcactcaacatggcaaggaagaccttaaattccctcgaggacaaggcgttccaattaacaccaatagcagtccagatgaccaaattggctactaccgaagagctaccagacgaattcgtggtggtgacggtaaaatgaaagatctcagtccaagatggtatttctactacctaggaactgggccagaagctggacttccctatggtgctaacaaagacggcatcatatgggttgcaactgagggagccttgaatacaccaaaagatcacattggcacccgcaatcctgctaacaatgctgcaatcgtgctacaacttcctcaaggaacaacattgccaaaaggcttctacgcagaagggagcagaggcggcagtcaagcctcttctcgttcctcatcacgtagtcgcaacagttcaagaaattcaactccaggcagcagtaggggaacttctcctgctagaatggctggcaatggcggtgatgctgctcttgctttgctgctgcttgacagattgaaccagcttgagagcaaaatgtctggtaaaggccaacaacaacaaggccaaactgtcactaagaaatctgctgctgaggcttctaagaagcctcggcaaaaacgtactgccactaaagcatacaatgtaacacaagctttcggcagacgtggtccagaacaaacccaaggaaattttggggaccaggaactaatcagacaaggaactgattacaaacattggccgcaaattgcacaatttgcccccagcgcttcagcgttcttcggaatgtcgcgcattggcatggaagtcacaccttcgggaacgtggttgacctacacaggtgccatcaaattggatgacaaagatccaaatttcaaagatcaagtcattttgctgaataagcatattgacgcatacaaaacattcccaccaacagagcctaaaaaggacaaaaagaagaaggctgatgaaactcaagccttaccgcagagacagaagaaacagcaaactgtgactcttcttcctgctgcagatttggatgatttctccaaacaattgcaacaatccatgagcagtgctgactcaactcaggcctaaactcatgcagaccacacaaggcagatgggctatataaacgttttcgcttttccgtttacgatatatagtctactcttgtgcagaatgaattctcgtaactacatagcacaagtagatgtagttaactttaatctcacatagcaatctttaatcagtgtgtaacattagggaggacttgaaagagccaccacattttcaccgaggccacgcggagtacgatcgagtgtacagtgaacaatgctagggagagctgcctatatggaagagccctaatgtgtaaaattaattttagtagtgctatccccatgtgattttaatagcttcttaggagaatgacaaaaaaaaaaaaaaaaaaaaaaaaaaaaaaaaaaaaaaaaaaaaaaaaaaaaaaaaaaagggtcggcatggcatctccacctcctcgcggtccgacctgggcatccgaaggaggacgcacgtccactcggatggctaagggagcagcacactggcggccgttactagggccgcgcccttcccaacagttgcgcagcctgaatggcgaatggagatccaatttttaagtgtataatgtgttaaactactgattctaattgtttgtgtattttagattcacagtcccaaggctcatttcaggcccctcagtcctcacagtctgttcatgatcataatcagccataccacatttgtagaggttttacttgctttaaaaaacctcccacacctccccctgaacctgaaacataaaatgaatgcaattgttgttgttaacttgtttattgcagcttataatggttacaaataaagcaatagcatcacaaatttcacaaataaagcatttttttcactgcattctagttgtggtttgtccaaactcatcaatgtatcttaaagcttgagtattctatagtctcacctaaatagcttggcgtaatcatggtcatagctgtttcctgtgtgaaattgttatccgctcacaattccacacaacatacgagccggaagcataaagtgtaaagcctggggtgcctaatgagtgagctaactcacattaattgcgttgcgctcactgcccgctttccagtcgggaaacctgtcgtgccagctgcattaatgaatcggccaacgcgaaccccttgcggccgcccgggccgtcgaccaattctcatgtttgacagcttatcatcgaatttctgccattcatccgcttattatcacttattcaggcgtagcaaccaggcgtttaagggcaccaataactgccttaaaaaaattacgccccgccctgccactcatcgcagtactgttgtaattcattaagcattctgccgacatggaagccatcacaaacggcatgatgaacctgaatcgccagcggcatcagcaccttgtcgccttgcgtataatatttgcccatggtgaaaacgggggcgaagaagttgtccatattggccacgtttaaatcaaaactggtgaaactcacccagggattggctgagacgaaaaacatattctcaataaaccctttagggaaataggccaggttttcaccgtaacacgccacatcttgcgaatatatgtgtagaaactgccggaaatcgtcgtggtattcactccagagcgatgaaaacgtttcagtttgctcatggaaaacggtgtaacaagggtgaacactatcccatatcaccagctcaccgtctttcattgccatacgaaattccggatgagcattcatcaggcgggcaagaatgtgaataaaggccggataaaacttgtgcttatttttctttacggtctttaaaaaggccgtaatatccagctgaacggtctggttataggtacattgagcaactgactgaaatgcctcaaaatgttctttacgatgccattgggatatatcaacggtggtatatccagtgatttttttctccattttagcttccttagctcctgaaaatctcgataactcaaaaaatacgcccggtagtgatcttatttcattatggtgaaagttggaacctcttacgtgccgatcaacgtctcattttcgccaaaagttggcccagggcttcccggtatcaacagggacaccaggatttatttattctgcgaagtgatcttccgtcacaggtatttattcgcgataagctcatggagcggcgtaaccgtcgcacaggaaggacagagaaagcgcggatctgggaagtgacggacagaacggtcaggacctggattggggaggcggttgccgccgctgctgctgacggtgtgacgttctctgttccggtcacaccacatacgttccgccattcctatgcgatgcacatgctgtatgccggtataccgctgaaagttctgcaaagcctgatgggacataagtccatcagttcaacggaagtctacacgaaggtttttgcgctggatgtggctgcccggcaccgggtgcagtttgcgatgccggagtctgatgcggttgcgatgctgaaacaattatcctgagaataaatgccttggcctttatatggaaatgtggaactgagtggatatgctgtttttgtctgttaaacagagaagctggctgttatccactgagaagcgaacgaaacagtcgggaaaatctcccattatcgtagagatccgcattattaatctcaggagcctgtgtagcgtttataggaagtagtgttctgtcatgatgcctgcaagcggtaacgaaaacgatttgaatatgccttcaggaacaatagaaatcttcgtgcggtgttacgttgaagtggagcggattatgtcagcaatggacagaacaacctaatgaacacagaaccatgatgtggtctgtccttttacagccagtagtgctcgccgcagtcgagcgacagggcgaagccctcggctggttgccctcgccgctgggctggcggccgtctatggccctgcaaacgcgccagaaacgccgtcgaagccgtgtgcgagacaccgcggccggccgccggcgttgtggatacctcgcggaaaacttggccctcactgacagatgaggggcggacgttgacacttgaggggccgactcacccggcgcggcgttgacagatgaggggcaggctcgatttcggccggcgacgtggagctggccagcctcgcaaatcggcgaaaacgcctgattttacgcgagtttcccacagatgatgtggacaagcctggggataagtgccctgcggtattgacacttgaggggcgcgactactgacagatgaggggcgcgatccttgacacttgaggggcagagtgctgacagatgaggggcgcacctattgacatttgaggggctgtccacaggcagaaaatccagcatttgcaagggtttccgcccgtttttcggccaccgctaacctgtcttttaacctgcttttaaaccaatatttataaaccttgtttttaaccagggctgcgccctgtgcgcgtgaccgcgcacgccgaaggggggtgcccccccttctcgaaccctcccggtcgagtgagcgaggaagcaccagggaacagcacttatatattctgcttacacacgatgcctgaaaaaacttcccttggggttatccacttatccacggggatatttttataattattttttttatagtttttagatcttcttttttagagcgccttgtaggcctttatccatgctggttctagagaaggtgttgtgacaaattgccctttcagtgtgacaaatcaccctcaaatgacagtcctgtctgtgacaaattgcccttaaccctgtgacaaattgccctcagaagaagctgttttttcacaaagttatccctgcttattgactcttttttatttagtgtgacaatctaaaaacttgtcacacttcacatggatctgtcatggcggaaacagcggttatcaatcacaagaaacgtaaaaatagcccgcgaatcgtccagtcaaacgacctcactgaggcggcatatagtctctcccgggatcaaaaacgtatgctgtatctgttcgttgaccagatcagaaaatctgatggcaccctacaggaacatgacggtatctgcgagatccatgttgctaaatatgctgaaatattcggattgacctctgcggaagccagtaaggatatacggcaggcattgaagagtttcgcggggaaggaagtggttttttatcgccctgaagaggatgccggcgatgaaaaaggctatgaatcttttccttggtttatcaaacgtgcgcacagtccatccagagggctttacagtgtacatatcaacccatatctcattcccttctttatcgggttacagaaccggtttacgcagtttcggcttagtgaaacaaaagaaatcaccaatccgtatgccatgcgtttatacgaatccctgtgtcagtatcgtaagccggatggctcaggcatcgtctctctgaaaatcgactggatcatagagcgttaccagctgcctcaaagttaccagcgtatgcctgacttccgccgccgcttcctgcaggtctgtgttaatgagatcaacagcagaactccaatgcgcctctcatacattgagaaaaagaaaggccgccagacgactcatatcgtattttccttccgcgatatcacttccatgacgacaggatagtctgagggttatctgtcacagatttgagggtggttcgtcacatttgttctgacctactgagggtaatttgtcacagttttgctgtttccttcagcctgcatggattttctcatactttttgaactgtaatttttaaggaagccaaatttgagggcagtttgtcacagttgatttccttctctttcccttcgtcatgtgacctgatatcgggggttagttcgtcatcattgatgagggttgattatcacagtttattactctgaattggctatccgcgtgtgtacctctacctggagtttttcccacggtggatatttcttcttgcgctgagcgtaagagctatctgacagaacagttcttctttgcttcctcgccagttcgctcgctatgctcggttacacggctgcggcg
